(19) United States
(12) Patent Application Publication
(10) Pub. No.: US 2025/0297007 A1
(43) Pub. Date: Sep. 25, 2025

(54) MULTIFUNCTIONAL MOLECULES BINDING TO TCR AND USES THEREOF

(71) Applicant: Marengo Therapeutics, Inc., Cambridge, MA (US)

(72) Inventors: Andrew Bayliffe, London (GB); Jessica Lynn Lowry, Southborough, MA (US); Jacques Moisan, Acton, MA (US); Madan Katragadda, Acton, MA (US); Gurkan Guntas, Newton, MA (US)

(21) Appl. No.: 19/175,269

(22) Filed: Apr. 10, 2025

Related U.S. Application Data
(63) Continuation of application No. PCT/US23/35056, filed on Oct. 12, 2023.
(60) Provisional application No. 63/379,243, filed on Oct. 12, 2022.

(51) Int. Cl. C07K 16/28; A61K 39/00; A61P 35/00; C07K 14/55; C07K 16/30

(52) U.S. Cl. CPC C07K 16/2809; A61P 35/00; C07K 14/55; C07K 16/2887; C07K 16/30; A61K 2039/505; C07K 2317/24; C07K 2317/31; C07K 2317/33; C07K 2317/622; C07K 2317/77; C07K 2317/92; C07K 2317/94

(57) ABSTRACT

Provides herein are multifunctional molecules comprising T cell receptor variable beta-binding moieties and cytokines, and methods of treating conditions or diseases in a subject using the same.

### CROSS REFERENCE

[0001] This application is a continuation of International Application No. PCT/US2023/035056 filed Oct. 12, 2023, which claims the benefit of U.S. Provisional Patent Application No. 63/379,243 filed Oct. 12, 2022, each of which is incorporated herein by reference in its entirety.

### SEQUENCE LISTING

[0002] The instant application contains a Sequence listing which has been submitted electronically in XML format and is herein incorporated by reference in its entirety. Said XML copy, created on Dec. 15, 2023, is named 53676-756_601_SL.xml and is 1,750,290 bytes in size.

### BACKGROUND

[0003] Currently available molecules designed to redirect T cells to promote tumor cell lysis for cancer immunotherapy typically target the CD3 epsilon (CD3e) subunit of the T cell receptor (TCR). However, there are limitations to this approach. Previous studies have shown that, e.g., low doses of anti-CD3e monoclonal antibody (mAb) can cause T cell dysfunction and exert immunosuppressive effects. In addition, anti-CD3e mAbs bind to all T cells and thus activate a large number of T cells. Such non-physiological massive activation of T cells by these anti-CD3e mAbs can result in the production of proinflammatory cytokines such as IFN-gamma, IL-1-beta, IL-6, IL-10 and TNF-alpha, causing a “cytokine storm” known as the cytokine release syndrome (CRS), which is also associated with neurotoxicity (NT). Thus, there is a need for improved T cell receptor-binding molecules that redirect T cells for cancer immunotherapy.

### SUMMARY

[0004] In an aspect, provided herein is, inter alia, a multifunctional molecule comprising: (a) a tumor-associated antigen binding moiety; (b) at least one cytokine molecule or a functional fragment or functional variant thereof, and (c) a TCRβV-binding moiety covalently linked to the at least one cytokine molecule or a functional fragment or functional variant thereof.

[0005] In some embodiments, the multifunctional molecule comprises a first polypeptide chain comprising a first portion of a dimerization module, and a second polypeptide chain comprising a second portion of the dimerization module; wherein the first polypeptide chain and the second polypeptide chain are non-contiguous, and wherein the tumor-associated antigen binding moiety is linked to the first portion of the dimerization module, and the at least one cytokine molecule or a functional fragment or functional variant thereof is linked to the first portion of the dimerization module, the second portion of the dimerization module, or a combination thereof.

[0006] In some embodiments, (i) the tumor-associated antigen binding moiety is linked to the N-terminus of the first portion of the dimerization module, and the at least one cytokine molecule or a functional fragment or functional variant thereof is linked to the C-terminus of the first portion of the dimerization module, the N-terminus of the second portion of the dimerization module, the C-terminus of the second portion of the dimerization module, or any combination thereof; or (ii) the tumor-associated antigen binding moiety is linked to the C-terminus of the first portion of the dimerization module, and the at least one cytokine molecule or a functional fragment or functional variant thereof is linked to the N-terminus of the first portion of the dimerization module, the N-terminus of the second portion of the dimerization module, the C-terminus of the second portion of the dimerization module, or any combination thereof.

[0007] In some embodiments, the TCRβV-binding moiety and the at least one cytokine molecule or a functional fragment or functional variant thereof is within a single contiguous polypeptide chain of the first polypeptide chain or the second polypeptide chain.

[0008] In some embodiments, the tumor-associated antigen binding moiety, the TCRβV-binding moiety, or a combination thereof comprises an antibody or antigen binding fragment thereof, wherein the antigen binding fragment comprises any one selected from the group consisting of a Fab, a F(ab′)2, an Fv, a single chain Fv (scFv), a single domain antibody, a diabody (dAb), a camelid antibody, and any combination thereof.

[0009] In some embodiments, the TCRβV-binding moiety comprises a heavy chain variable domain (VH) and a light chain variable domain (VL), or a single domain antibody.

[0010] In some embodiments, the TCRβV-binding moiety comprises a first portion of the TCRβV-binding moiety, and wherein the multifunctional molecule further comprises a third polypeptide chain comprising a second portion of the TCRβV-binding moiety, wherein the third polypeptide chain is non-contiguous with the first polypeptide chain and the second polypeptide chain.

[0011] In some embodiments, the first portion of the TCRβV-binding moiety comprises a VH of the TCRβV-binding moiety and the second portion of the TCRβV-binding moiety comprises a VL of the TCRβV-binding moiety, or the first portion of the TCRβV-binding moiety comprises a VL of the TCRβV-binding moiety and the second portion of the TCRβV-binding moiety comprises a VH of the TCRβV-binding moiety.

[0012] In some embodiments, the tumor-associated antigen binding moiety comprises a VH and a VL, or a single domain antibody.

[0013] In some embodiments, the tumor-associated antigen binding moiety comprises a first portion of the tumor-associated antigen binding moiety, and wherein the multifunctional molecule further comprises a fourth polypeptide chain comprising a second portion of the tumor-associated antigen binding moiety, wherein the fourth polypeptide chain is non-contiguous with the first polypeptide chain, the second polypeptide chain, and the third polypeptide chain.

[0014] In some embodiments, the first portion of the tumor-associated antigen binding moiety comprises a VH of the tumor-associated antigen binding moiety and the second portion of the tumor-associated antigen binding moiety comprises a VL of the tumor-associated antigen binding moiety, or the first portion of the tumor-associated antigen binding moiety comprises a VL of the tumor-associated antigen binding moiety and the second portion of the tumor-associated antigen binding moiety comprises a VH of the tumor-associated antigen binding moiety.

[0015] In some embodiments, the first portion of the dimerization module and the second portion of the dimerization module are dimerized.

[0016] In some embodiments. (i) the tumor-associated antigen binding moiety further comprises a heavy chain constant domain 1 (CH1) linked to the VH of the tumor-associated antigen binding moiety; (ii) the TCRβV-binding moiety further comprises a heavy chain constant domain 1 (CH1) linked to the VH of the TCRβV-binding moiety; or (iii) a combination thereof.

[0017] In some embodiments, (i) the tumor-associated antigen binding moiety further comprises a light chain constant domain (CL) linked to the VL of the tumor-associated antigen binding moiety; (ii) the TCRβV-binding moiety further comprises a light chain constant domain (CL) linked to the VL of the TCRβV-binding moiety; or (iii) a combination thereof.

[0018] In some embodiments. (i) the CL linked to the VL of the tumor-associated antigen binding moiety comprises a kappa chain constant domain or a lambda chain constant domain; (ii) the CL linked to the VL of the TCRβV-binding moiety comprises a kappa chain constant domain or a lambda chain constant domain; or (iii) a combination thereof.

[0019] In some embodiments, the kappa chain constant domain or the lambda chain constant domain comprises any one of the light chain constant region sequences listed in Table 3, 21, or 22.

[0020] In some embodiments, the multifunctional molecule as provided herein further comprises: (i) a linker between the first portion of the dimerization module and the tumor-associated antigen binding moiety or the first portion of the tumor-associated antigen; (ii) a linker between the at least one cytokine molecule or a functional fragment or functional variant thereof and the first portion of the dimerization module, a linker between the at least one cytokine molecule or a functional fragment or functional variant thereof and the second portion of the dimerization module, or any combination thereof; (iii) a linker between the at least one cytokine molecule or a functional fragment or functional variant thereof and the TCRβV-binding moiety or the first portion of the TCRβV-binding moiety; (iv) a linker between the VH and the VL of the tumor-associated antigen binding moiety; (v) a linker between the VH and the VL of the TCRβV-binding moiety; (vi) a linker between the CH1 and the VH of the tumor-associated antigen binding moiety; (vii) a linker between the CH1 and the VH of the TCRβV-binding moiety; (viii) a linker between the CL and the VL of the tumor-associated antigen binding moiety; (ix) a linker between the CL and the VL of the TCRβV-binding moiety; or (x) any combination thereof.

[0021] In some embodiments, the linker is selected from the group consisting of a cleavable linker, a non-cleavable linker, a peptide linker, a flexible linker, a rigid linker, a helical linker, and a non-helical linker.

[0022] In some embodiments, the linker is the peptide linker, and wherein the linker comprises the sequence of SEQ ID NO: 3308 or SEQ ID NO: 3643.

[0023] In some embodiments, the multifunctional molecule is an isolated multifunctional molecule.

[0024] In some embodiments, the tumor-associated antigen binding moiety, the TCRβV-binding moiety, or a combination thereof comprises the Fab or the scFv.

[0025] In some embodiments, the at least one cytokine molecule or a functional fragment or functional variant thereof is selected from the group consisting of interleukin-2 (IL-2) or a functional fragment or functional variant thereof, interleukin-7 (IL-7) or a functional fragment or functional variant thereof, interleukin-12 (IL-12) or a functional fragment or functional variant thereof, interleukin-15 (IL-15) or a functional fragment or functional variant thereof, interleukin-18 (IL-18) or a functional fragment or functional variant thereof, interleukin-21 (IL-21) or a functional fragment or functional variant thereof, or interferon gamma or a functional fragment or functional variant thereof, or any combination thereof.

[0026] In some embodiments, the at least one cytokine molecule or a functional fragment or functional variant thereof comprises interleukin-2 (IL-2) or a functional fragment or functional variant thereof.

[0027] In some embodiments, the at least one cytokine molecule or a functional fragment or functional variant thereof is an IL-2 variant comprising a substitution mutation.

[0028] In some embodiments, the at least one cytokine molecule or a functional fragment or functional variant thereof is an IL-2 variant comprising C125A mutation.

[0029] In some embodiments, the at least one cytokine molecule or a functional fragment or functional variant thereof comprises a sequence having at least 75% sequence identity to the sequence of SEQ ID NO: 2270 or the sequence of SEQ ID NO: 2191.

[0030] In some embodiments, the at least one cytokine molecule or a functional fragment or functional variant thereof comprises the sequence of SEQ ID NO: 2270 or the sequence of SEQ ID NO: 2191.

[0031] In some embodiments, the first portion of the dimerization module comprises a first immunoglobulin constant regions (Fc regions) and the second portion of the dimerization module comprises a second Fc region.

[0032] In some embodiments, the first Fc region, the second Fc region, or a combination thereof is selected from the group consisting of an IgG1 Fc region or a fragment thereof, an IgG2 Fc region or a fragment thereof, an IgG3 Fc region or a fragment thereof, an IgGA1 Fc region or a fragment thereof, an IgGA2 Fc region or a fragment thereof, an IgG4 Fc region or a fragment thereof, an IgJ Fc region or a fragment thereof, an IgM Fc region or a fragment thereof, an IgD Fc region or a fragment thereof, and an IgE Fc region or a fragment thereof.

[0033] In some embodiments, the first Fc region, the second Fc region, or a combination thereof is selected from the group consisting of a human IgG1 Fc region or a fragment thereof, a human IgG2 Fc region or a fragment thereof, and a human IgG4 Fc region or a fragment thereof.

[0034] In some embodiments, the first Fc region, the second Fc region, or a combination thereof comprises an Fc interface with one or more of: a paired cavity-protuberance, an electrostatic interaction, or a strand-exchange, wherein the dimerization of the first Fc region and the second Fc region is enhanced as indicated by a greater ratio of heteromultimer:homomultimer forms relative to a dimerization of Fc regions with a non-engineered interface.

[0035] In some embodiments, the first Fc region, the second Fc region, or a combination thereof comprises an amino acid substitution listed in Table 14, 21, or 22.

[0036] In some embodiments, the first Fc region, the second Fc region, or a combination thereof comprises an Asn297Ala (N297A) mutation or a Leu234Ala/Leu235Ala (LALA) mutation.

[0037] In some embodiments, the first Fc region, the second Fc region, or a combination thereof comprises a sequence having at least 75% sequence identity to the sequence of SEQ ID NO: 40, SEQ ID NO: 42, SEQ ID NO: 3645, SEQ ID NO: 3646, SEQ ID NO: 3647, SEQ ID NO:3648, SEQ ID NO: 3649, SEQ ID NO: 3792, or SEQ ID NO: 3794.

[0038] In some embodiments, the first Fc region, the second Fc region, or a combination thereof comprises the sequence of SEQ ID NO: 40, SEQ ID NO: 42, SEQ ID NO: 3645, SEQ ID NO: 3646, SEQ ID NO: 3647, SEQ ID NO:3648, SEQ ID NO: 3649, SEQ ID NO: 3792, or SEQ ID NO: 3794.

[0039] In some embodiments, the first Fc region comprises a sequence having at least 75% sequence identity to the sequence of SEQ ID NO: 3649 or SEQ ID NO: 3792, and the second Fc region comprises a sequence having at least 75% sequence identity to the sequence of SEQ ID NO: 3648 or SEQ ID NO: 3794, or the first Fc region comprises a sequence having at least 75% sequence identity to the sequence of SEQ ID NO: 3648 or SEQ ID NO: 3794, and the second Fc region comprises a sequence having at least 75% sequence identity to the sequence of SEQ ID NO: 3648 or SEQ ID NO: 3794.

[0040] In some embodiments, the first Fc region comprises a sequence having the sequence of SEQ ID NO: 3649 or SEQ ID NO: 3792, and the second Fc region comprises the sequence of SEQ ID NO: 3648 or SEQ ID NO: 3794, or the first Fc region comprises the sequence of SEQ ID NO: 3648 or SEQ ID NO: 3794, and the second Fc region comprises the sequence of SEQ ID NO: 3648 or SEQ ID NO: 3794.

[0041] In some embodiments, the TCRβV-binding moiety binds to one or more of a TCRβV subfamily selected from the group consisting of TCRβ V2 subfamily, TCRβ V3 subfamily, TCRβ V4 subfamily, TCRβ V5 subfamily, TCRβ V6 subfamily, TCRβ V9 subfamily, TCRβ V10 subfamily, TCRβ V11 subfamily, TCRβ V12 subfamily, TCRβ V13 subfamily, TCRβ V16 subfamily, TCRβ V19, TCRβ V20 subfamily, TCRβ V21 subfamily, TCRβ V23 subfamily, TCRβ V27 subfamily, and TCRβ V28 subfamily.

[0042] In some embodiments, the TCRβV-binding moiety binds to one or more of a TCRβV subfamily selected from the group consisting of: (i) TCRβ V2 subfamily comprising TCRβ V2*01; (ii) TCRβ V3 subfamily comprising TCRβ V3-1*01; (iii) TCRβ V4 subfamily comprising one or more selected from TCRB V4-1, TCRβ V4-2, and TCRβ V4-3; (iv) TCRβ V5 subfamily comprising one or more selected from TCRB V5-6*01, TCRβ V5-4*01, TCRβ V5-1*01, and TCRβ V5-8*01; (v) TCRβ V6 subfamily comprising one or more selected from TCRβ V6-4*01, TCRβ V6-4*02, TCRβ V6-9*01, TCRβ V6-8*01, TCRβ V6-5*01. TCRβ V6-6*02, TCRβ V6-6*01, TCRβ V6-2*01, TCRβ V6-3*01, and TCRβ V6-1*01; (vi) TCRβ V10 subfamily comprising one or more selected from TCRβ V10-1*01, TCRβ V10-1*02, TCRβ V10-3*01, and TCRβ V10-2*01; (vii) TCRβ V11 subfamily comprising TCRβ V11-2; (viii) TCRβ V12 subfamily comprising one or more selected from TCRβ V12-4*01, TCRβ V12-3*01, and TCRβ V12-5*01; (ix) TCRβ V13 subfamily comprising TCRβ V13*01; (x) TCRβ V16 subfamily comprising TCRβ V16*01; (xi) TCRβ V19 subfamily comprising one or more selected from TCRβ V19*01 and TCRβ V19*02; or (xii) TCRβ V20 subfamily comprising TCRβ V20-1*01, or TCRβ V20-1*02.

[0043] In some embodiments, the TCRβV-binding moiety binds to TCRβ V6 subfamily or TCRβ V20 subfamily.

[0044] In some embodiments, the TCRβV-binding moiety comprises: (i) a VH comprising a combination of a HC CDR1, a HC CDR2 and a HC CDR3 listed in Tables 1, 2, 10B, 11, 12, 13, 21, or 22; (ii) a VL comprising a combination of a LC CDR1, a LC CDR2, and a LC CDR3 listed in Tables 1, 2, 10B, 11, 12, 13, 21, or 22; or (iii) a combination thereof.

[0045] In some embodiments, the TCRβV-binding moiety comprises: (i) a VH comprising a HC CDR1, a HC CDR2 and a HC CDR3 of any one of the heavy chain variable domain amino acid sequences listed in Tables 1, 2, 10B, 11, 12, 13, 21, or 22; (ii) a VL comprising a LC CDR1, a LC CDR2, and a LC CDR3 of any one of the light chain variable domain amino acid sequences listed in Tables 1, 2, 10B, 11, 12, 13, 21, or 22; or (iii) a combination thereof.

[0046] In some embodiments, the TCRβV-binding moiety comprises: (i) a VH comprising a sequence having at least 70% sequence identity to any one of the heavy chain variable domain amino acid sequences listed in Tables 1, 2, 10B, 11, 12, 13, 21, or 22; (i) a VL comprising a sequence having at least 70% sequence identity to any one of the light chain variable domain amino acid sequences listed in Tables 1, 2, 10B, 11, 12, 13, 21, or 22; (iii) a combination thereof.

[0047] In some embodiments, the TCRβV-binding moiety comprises: (i) a VH comprising any one of the heavy chain variable domain amino acid sequences listed in Tables 1, 2, 10B, 11, 12, 13, 21, or 22; (ii) a VL comprising any one of the light chain variable domain amino acid sequences listed in Tables 1, 2, 10B, 11, 12, 13, 21, or 22. (iii) a combination thereof.

[0048] In some embodiments, the second polypeptide chain comprises a sequence having at least 70% sequence identity to the sequence of SEQ ID NO: 1346, a sequence having at least 70% sequence identity to the sequence of SEQ ID NO: 1349, a sequence having at least 70% sequence identity to the sequence of SEQ ID NO: 2270, and a sequence having at least 70% sequence identity to the sequence of SEQ ID NO: 3648.

[0049] In some embodiments, the second polypeptide chain comprises the sequence of SEQ ID NO: 1346, the sequence of SEQ ID NO: 1349, the sequence of SEQ ID NO: 2270, and the sequence of SEQ ID NO: 3648.

[0050] In some embodiments, the second polypeptide chain further comprises the sequence of SEQ ID NO: 3801, the sequence of SEQ ID NO: 3309, the sequence of SEQ ID NO: 3308, or any combination thereof.

[0051] In some embodiments, the second polypeptide chain comprises a sequence having at least 70% sequence identity to the sequence of SEQ ID NO: 1346 operatively linked to a sequence having at least 70% sequence identity to the sequence of SEQ ID NO: 1349 operatively linked to a sequence having at least 70% sequence identity to the sequence of SEQ ID NO: 2270 operatively linked to a sequence having at least 70% sequence identity to the sequence of SEQ ID NO: 3648.

[0052] In some embodiments, the sequence having at least 70% sequence identity to the sequence of SEQ ID NO: 1346 is operatively linked to the sequence having at least 70% sequence identity to the sequence of SEQ ID NO: 1349 via the sequence of SEQ ID NO: 3801.

[0053] In some embodiments, the sequence having at least 70% sequence identity to the sequence of SEQ ID NO: 1349 is operatively linked to the sequence having at least 70% sequence identity to the sequence of SEQ ID NO: 2270 via the sequence of SEQ ID NO: 3309.

[0054] In some embodiments, the sequence having at least 70% sequence identity to the sequence of SEQ ID NO: 2270 is operatively linked to the sequence having at least 70% sequence identity to the sequence of SEQ ID NO: 3648 via the sequence of SEQ ID NO: 3308.

[0055] In some embodiments, the second polypeptide chain comprises the sequence of SEQ ID NO: 1346 operatively linked to the sequence of SEQ ID NO: 1349 operatively linked to the sequence of SEQ ID NO: 2270 operatively linked to the sequence of SEQ ID NO: 3648.

[0056] In some embodiments, the sequence of SEQ ID NO: 1346 is operatively linked to the sequence of SEQ ID NO: 1349 via the sequence of SEQ ID NO: 3801.

[0057] In some embodiments, the sequence of SEQ ID NO: 1349 is operatively linked to the sequence of SEQ ID NO: 2270 via the sequence of SEQ ID NO: 3309.

[0058] In some embodiments, the sequence of SEQ ID NO: 2270 is operatively linked to the sequence of SEQ ID NO: 3648 via the sequence of SEQ ID NO: 3308.

[0059] In some embodiments, the second polypeptide chain comprises a sequence having at least 70% sequence identity to the sequence of SEQ ID NO: 3800.

[0060] In some embodiments, the second polypeptide chain comprises the sequence of SEQ ID NO: 3800.

[0061] In some embodiments, the multifunctional molecule consists of a first polypeptide chain and a second polypeptide chain, wherein the first polypeptide chain comprises the tumor-associated antigen binding moiety linked to an Fc region, wherein the tumor-associated antigen binding moiety is an scFv that binds to a tumor-associated antigen, and the second polypeptide chain comprises the sequence of SEQ ID NO 3800.

[0062] In some embodiments, the multifunctional molecule consists of a first polypeptide chain and a second polypeptide chain, wherein the first polypeptide chain comprises the tumor-associated antigen binding moiety linked to a sequence having at least 75% sequence identity to the sequence of SEQ ID NO: 3649 or SEQ ID NO: 3792, wherein the tumor-associated antigen binding moiety is an scFv that binds to a tumor-associated antigen, and the second polypeptide chain comprises the sequence of SEQ ID NO 3800.

[0063] In some embodiments, the multifunctional molecule consists of a first polypeptide chain and a second polypeptide chain, wherein the first polypeptide chain comprises the tumor-associated antigen binding moiety linked to the sequence of SEQ ID NO. 3649 or SEQ ID NO: 3792, wherein the tumor-associated antigen binding moiety is an scFv that binds to a tumor-associated antigen, and the second polypeptide chain comprises the sequence of SEQ ID NO 3800.

[0064] In some embodiments, the multifunctional molecule consists of a first polypeptide chain, a second polypeptide chain, and a third polypeptide chain, wherein the first polypeptide chain comprises a first portion of the tumor-associated antigen binding moiety linked to an Fc region, wherein the tumor-associated antigen binding moiety is an Fab that binds to a tumor-associated antigen: the second polypeptide chain comprises the sequence of SEQ ID NO 3800; and the third polypeptide chain comprises a second portion of the tumor-associated antigen binding moiety.

[0065] In some embodiments, the multifunctional molecule consists of a first polypeptide chain, a second polypeptide chain, and a third polypeptide chain, wherein the first polypeptide chain comprises a first portion of the tumor-associated antigen binding moiety linked to a sequence having at least 75% sequence identity to the sequence of SEQ ID NO: 3649 or SEQ ID NO: 3792, wherein the tumor-associated antigen binding moiety is an Fab that binds to a tumor-associated antigen; the second polypeptide chain comprises the sequence of SEQ ID NO 3800; and the third polypeptide chain comprises a second portion of the tumor-associated antigen binding moiety.

[0066] In some embodiments, the multifunctional molecule consists of a first polypeptide chain, a second polypeptide chain, and a third polypeptide chain, wherein the first polypeptide chain comprises a first portion of the tumor-associated antigen binding moiety linked to the sequence of SEQ ID NO: 3649 or SEQ ID NO: 3792, wherein the tumor-associated antigen binding moiety is an Fab that binds to a tumor-associated antigen; the second polypeptide chain comprises the sequence of SEQ ID NO 3800; and the third polypeptide chain comprises a second portion of the tumor-associated antigen binding moiety.

[0067] In some embodiments, the tumor-associated antigen binding moiety binds to a cancer antigen selected from the group consisting of CD19, CD123, CD22, CD30, CD171, CS-1, C-type lectin-like molecule-1, CD33, epidermal growth factor receptor variant III (EGFRvIII), ganglioside G2 (GD2), ganglioside GD3, TNF receptor family member B cell maturation (BCMA), Tn antigen ((Tn Ag) or (GalNAcα-Ser/Thr)), prostate-specific membrane antigen (PSMA). Receptor tyrosine kinase-like orphan receptor 1 (ROR1), Fms-Like Tyrosine Kinase 3 (FLT3), Tumor-associated glycoprotein 72 (TAG72), CD38, CD44v6. Carcinoembryonic antigen (CEA). Epithelial cell adhesion molecule (EPCAM). B7H3 (CD276), KIT (CD117). Interleukin-13 receptor subunit alpha-2, mesothelin, Interleukin 11 receptor alpha (IL-11Ra), prostate stem cell antigen (PSCA). Protease Serine 21, vascular endothelial growth factor receptor 2 (VEGFR2), Lewis (Y) antigen, CD24. Platelet-derived growth factor receptor beta (PDGFR-beta). Stage-specific embryonic antigen-4 (SSEA-4), CD20, Folate receptor alpha, Receptor tyrosine-protein kinase ERBB2 (Her2/neu), Mucin 1, cell surface associated (MUC1), epidermal growth factor receptor (EGFR), neural cell adhesion molecule (NCAM). Prostase, prostatic acid phosphatase (PAP), elongation factor 2 mutated (ELF2M), Ephrin B2, fibroblast activation protein alpha (FAP), insulin-like growth factor 1 receptor (IGF-I receptor), carbonic anhydrase IX (CAIX), Proteasome (Prosome, Macropain) Subunit, Beta Type. 9 (LMP2), glycoprotein 100 (gp100/pmel17), oncogene fusion protein consisting of breakpoint cluster region (BCR) and Abelson murine leukemia viral oncogene homolog 1 (Abl) (bcr-abl), tyrosinase, ephrin type-A receptor 2 (EphA2), Fucosyl GM1, sialyl Lewis adhesion molecule (sLe), ganglioside GM3, transglutaminase 5 (TGS5), high molecular weight-melanoma-associated antigen (HMWMAA), o-acetyl-GD2 ganglioside (OAcGD2), Folate receptor beta, tumor endothelial marker 1 (TEM1/CD248), tumor endothelial marker 7-related (TEM7R), claudin 6 (CLDN6), thyroid stimulating hormone receptor (TSHR), G protein-coupled receptor class C group 5, member D (GPRC5D), chromosome X open reading frame 61 (CXORF61), CD97, CD179a, anaplastic lymphoma kinase (ALK), Polysialic acid, placenta-specific 1 (PLAC1), hexasaccharide portion of globoH glycoceramide (GloboH), mammary gland differentiation antigen (NY-BR-1), uroplakin 2 (UPK2), Hepatitis A virus cellular receptor 1 (HAVCR1), adrenoceptor beta 3 (ADRB3), pannexin 3 (PANX3). G protein-coupled receptor 20 (GPR20), lymphocyte antigen 6 complex, locus K 9 (LY6K), Olfactory receptor 51E2 (OR51E2), TCR Gamma Alternate Reading Frame Protein (TARP), Wilms tumor protein (WT1), Cancer/testis antigen 1 (NY-ESO-1/LAGE-1), Cancer/testis antigen 2 (LAGE-1a), Melanoma-associated antigen 1 (MAGE-A1), ETS translocation-variant gene 6, located on chromosome 12p (ETV6-AML), sperm protein 17 (SPA17), X Antigen Family, Member 1A (XAGE1), angiopoietin-binding cell surface receptor 2 (Tie 2), melanoma cancer testis antigen-1 (MAD-CT-1), melanoma cancer testis antigen-2 (MAD-CT-2), Fos-related antigen 1, tumor protein p53 (p53), p53 mutant, prostein, Survivin, telomerase, prostate carcinoma tumor antigen-1, melanoma antigen recognized by T cells 1. Rat sarcoma (Ras) mutant, human Telomerase reverse transcriptase (hTERT), sarcoma translocation breakpoints, melanoma inhibitor of apoptosis (ML-IAP), ERG (transmembrane protease, serine 2 (TMPRSS2) ETS fusion gene), N-Acetyl glucosaminyl-transferase V (NA17), paired box protein Pax-3 (PAX3), Androgen receptor, Cyclin B1, v-myc avian myelocytomatosis viral oncogene neuroblastoma derived homolog (MYCN). Ras Homolog Family Member C (RhoC), Tyrosinase-related protein 2 (TRP-2), Cytochrome P450 1B1 (CYP1B1), CCCTC-Binding Factor (Zinc Finger Protein)-Like, Squamous Cell Carcinoma Antigen Recognized By T Cells 3 (SART3). Paired box protein Pax-5 (PAX5), proacrosin binding protein sp32 (OY-TES1), lymphocyte-specific protein tyrosine kinase (LCK), A kinase anchor protein 4 (AKAP-4), synovial sarcoma, X breakpoint 2 (SSX2). Receptor for Advanced Glycation Endproducts (RAGE-1), renal ubiquitous 1 (RU1), renal ubiquitous 2 (RU2), legumain, human papilloma virus E6 (HPV E6), human papilloma virus E7 (HPV E7), intestinal carboxyl esterase, heat shock protein 70-2 mutated (mut bsp 70-2), CD79a, CD79b, CD72. Leukocyte-associated immunoglobulin-like receptor 1 (LAIR1), Fc fragment of IgA receptor (FCAR or CD89), Leukocyte immunoglobulin-like receptor subfamily A member 2 (LILRA2), CD300 molecule-like family member f (CD300LF), C-type lectin domain family 12 member A (CLEC12A), bone marrow stromal cell antigen 2 (BST2), EGF-like module-containing mucin-like hormone receptor-like 2 (EMR2), lymphocyte antigen 75 (LY75), Glypican-3 (GPC3), Fc receptor-like 5 (FCRL5), FcRH5, PDL1, CD47, prostate specific membrane antigen (PMSA), prostate-specific antigen (PSA), Ron Kinase, c-Met, Immature laminin receptor, TAG-72, BING-4, Calcium-activated chloride channel 2, Cyclin-B1, 9D7, Ep-CAM, EphA3, SAP-1, PRAME, SSX-2, Melan-A/MART-1, TRP1/gp75, MC1R, β-catenin, BRCA1/2, CDK4, CML66, Fibronectin. Ras, TGF-B receptor, AFP, ETA, MAGE, CA-125, BAGE, GAGE, CDC27, α actinin-4, gangliosides, MART-2, MUC2, MUM1, MUM2, MUM3, NA88-1, NPM, OA1, OGT, RCC, RUI1, RU12, SAGE, TRG, TSTA, L1-CAM, gpA33, GM2, VEGFR, Integrins, carbohydrates, TRAILR1, TRAILR2, RANKL, TGF-beta, hyaluronic acid, collagen, tenascin C, tenascin W, and immunoglobulin lambda-like polypeptide 1 (IGLL1).

[0068] In some embodiments, the tumor-associated antigen binding moiety binds to a cancer antigen selected from the group consisting of CD20, MSLN, gp75 (Tryp1), or any combination thereof.

[0069] In some embodiments, the multifunctional molecule is a polypeptide molecule.

[0070] In some embodiments, the tumor-associated antigen binding moiety comprises a VH comprising a HC CDR1, a HC CDR2 and a HC CDR3 comprising the sequences of SEQ ID NO: 524, SEQ ID NO: 525, and SEQ ID NO: 526, respectively, or a VH comprising a HC CDR1, a HC CDR2 and a HC CDR3 comprising the sequences of SEQ ID NO: 538, SEQ ID NO: 539, and SEQ ID NO: 540, respectively.

[0071] In some embodiments, the tumor-associated antigen binding moiety comprises a VL comprising a LC CDR1, a LC CDR2 and a LC CDR3 comprising the sequences of SEQ ID NO: 1168, SEQ ID NO: 1295, and SEQ ID NO: 528, respectively, or a VL comprising a LC CDR1, a LC CDR2 and a LC CDR3 comprising the sequences of SEQ ID NO: 562, SEQ ID NO: 563, and SEQ ID NO: 564, respectively.

[0072] In some embodiments, the tumor-associated antigen binding moiety comprises a VH comprising a HC CDR1, a HC CDR2 and a HC CDR3 comprising the sequences of SEQ ID NO: 524, SEQ ID NO: 525, and SEQ ID NO: 526, respectively, and a VL comprising a LC CDR1, a LC CDR2 and a LC CDR3 comprising the sequences of SEQ ID NO: 1168, SEQ ID NO: 1295, and SEQ ID NO: 528, respectively.

[0073] In some embodiments, the tumor-associated antigen binding moiety comprises a VH comprising a HC CDR1, a HC CDR2 and a HC CDR3 comprising the sequences of SEQ ID NO: 538, SEQ ID NO: 539, and SEQ ID NO: 540, respectively, and a VL comprising a LC CDR1, a LC CDR2 and a LC CDR3 comprising the sequences of SEQ ID NO: 562, SEQ ID NO: 563, and SEQ ID NO: 564, respectively.

[0074] In some embodiments, the tumor-associated antigen binding moiety comprises a VH comprising a sequence having at least 70% sequence identity to the sequence of SEQ ID NO: 523 or the sequence of SEQ ID NO: 537.

[0075] In some embodiments, the tumor-associated antigen binding moiety comprises a VL comprising a sequence having at least 70% sequence identity to the sequence of SEQ ID NO: 527 or the sequence of SEQ ID NO: 561.

[0076] In some embodiments, the tumor-associated antigen binding moiety comprises a VH comprising the sequence of SEQ ID NO: 523 or the sequence of SEQ ID NO: 537.

[0077] In some embodiments, the tumor-associated antigen binding moiety comprises a VL comprising the sequence of SEQ ID NO: 527 or the sequence of SEQ ID NO: 561.

[0078] In some embodiments, the tumor-associated antigen binding moiety comprises a VH comprising a sequence having at least 70% sequence identity to the sequence of SEQ ID NO: 523 and a VL comprising a sequence having at least 70% sequence identity to the sequence of SEQ ID NO: 527.

[0079] In some embodiments, the tumor-associated antigen binding moiety comprises a VH comprising the sequence of SEQ ID NO: 523 and a VL comprising the sequence of SEQ ID NO: 527.

[0080] In some embodiments, the tumor-associated antigen binding moiety comprises a VH comprising a sequence having at least 70% sequence identity to the sequence of SEQ ID NO: 537 and a VL comprising a sequence having at least 70% sequence identity to the sequence of SEQ ID NO: 561.

[0081] In some embodiments, the tumor-associated antigen binding moiety comprises a VH comprising the sequence of SEQ ID NO: 537 and a VL comprising the sequence of SEQ ID NO: 561.

[0082] In some embodiments, the tumor-associated antigen binding moiety comprises a VH comprising a HC CDR1, a HC CDR2 and a HC CDR3 comprising the sequences of SEQ ID NO: 581, SEQ ID NO. 582, and SEQ ID NO: 583, respectively.

[0083] In some embodiments, the tumor-associated antigen binding moiety comprises a VL comprising a LC CDR1, a LC CDR2 and a LC CDR3 comprising the sequences of SEQ ID NO: 586, SEQ ID NO: 587, and SEQ ID NO: 588, respectively.

[0084] In some embodiments, the tumor-associated antigen binding moiety comprises a VH comprising a HC CDR1, a HC CDR2 and a HC CDR3 comprising the sequences of SEQ ID NO: 581, SEQ ID NO: 582, and SEQ ID NO: 583, respectively, and a VL comprising a LC CDR1, a LC CDR2 and a LC CDR3 comprising the sequences of SEQ ID NO: 586, SEQ ID NO: 587, and SEQ ID NO: 588, respectively.

[0085] In some embodiments, the tumor-associated antigen binding moiety comprises a VH comprising a sequence having at least 70% sequence identity to the sequence of SEQ ID NO: 580.

[0086] In some embodiments, the tumor-associated antigen binding moiety comprises a VL comprising a sequence having at least 70% sequence identity to the sequence of SEQ ID NO: 585.

[0087] In some embodiments, the tumor-associated antigen binding moiety comprises a VH comprising the sequence of SEQ ID NO: 580.

[0088] In some embodiments, the tumor-associated antigen binding moiety comprises a VL comprising the sequence of SEQ ID NO. 585.

[0089] In some embodiments, the tumor-associated antigen binding moiety comprises a VH comprising a sequence having at least 70% sequence identity to the sequence of SEQ ID NO: 580 and a VL comprising a sequence having at least 70% sequence identity to the sequence of SEQ ID NO: 585.

[0090] In some embodiments, the tumor-associated antigen binding moiety comprises a VH comprising the sequence of SEQ ID NO: 580 and a VL comprising the sequence of SEQ ID NO: 585.

[0091] In some embodiments, the TCRβV-binding moiety comprises a VH comprising a HC CDR1, a HC CDR2 and a HC CDR3 comprising the sequences of SEQ ID NO: 3650, SEQ ID NO: 3651, and SEQ ID NO: 5, respectively, or a VH comprising a HC CDR1, a HC CDR2 and a HC CDR3 comprising the sequences of SEQ ID NO: 542, SEQ ID NO. 543, and SEQ ID NO: 544, respectively.

[0092] In some embodiments, the TCRβV-binding moiety comprises a VL comprising a LC CDR1, a LC CDR2 and a LC CDR3 comprising the sequences of SEQ ID NO: 3655, SEQ ID NO: 3653, and SEQ ID NO: 8, respectively, or a VL comprising a LC CDR1, a LC CDR2 and a LC CDR3 comprising the sequences of SEQ ID NO: 545, SEQ ID NO: 546, and SEQ ID NO: 547, respectively.

[0093] In some embodiments, the TCRβV-binding moiety comprises a VH comprising a HC CDR1, a HC CDR2 and a HC CDR3 comprising the sequences of SEQ ID NO: 3650, SEQ ID NO: 3651, and SEQ ID NO: 5, respectively, and a VL comprising a LC CDR1, a LC CDR2 and a LC CDR3 comprising the sequences of SEQ ID NO: 3655, SEQ ID NO: 3653, and SEQ ID NO: 8, respectively.

[0094] In some embodiments, the TCRβV-binding moiety comprises a VH comprising a HC CDR1, a HC CDR2 and a HC CDR3 comprising the sequences of SEQ ID NO: 542, SEQ ID NO: 543, and SEQ ID NO: 544, respectively, and a VL comprising a LC CDR1, a LC CDR2 and a LC CDR3 comprising the sequences of SEQ ID NO: 545, SEQ ID NO: 546, and SEQ ID NO: 547, respectively.

[0095] In some embodiments, the TCRβV-binding moiety comprises a VH comprising a sequence having at least 70% sequence identity to the sequence of SEQ ID NO: 1346 or the sequence of SEQ ID NO: 541.

[0096] In some embodiments, the TCRβV-binding moiety comprises a VL comprising a sequence having at least 70% sequence identity to the sequence of SEQ ID NO: 1349 or the sequence of SEQ ID NO: 3527.

[0097] In some embodiments, the TCRβV-binding moiety comprises a VH comprising the sequence of SEQ ID NO: 1346 or the sequence of SEQ ID NO: 541.

[0098] In some embodiments, the TCRβV-binding moiety comprises a VL comprising the sequence of SEQ ID NO: 1349 or the sequence of SEQ ID NO: 3527.

[0099] In some embodiments, the TCRβV-binding moiety comprises a VH comprising a sequence having at least 70% sequence identity to the sequence of SEQ ID NO: 1346 and a VL comprising a sequence having at least 70% sequence identity to the sequence of SEQ ID NO: 1349.

[0100] In some embodiments, the TCRβV-binding moiety comprises a VH comprising the sequence of SEQ ID NO: 1346 and a VL comprising the sequence of SEQ ID NO. 1349.

[0101] In some embodiments, the TCRβV-binding moiety comprises a VH comprising a sequence having at least 70% sequence identity to the sequence of SEQ ID NO: 541 and a VL comprising a sequence having at least 70% sequence identity the sequence of SEQ ID NO: 3527.

[0102] In some embodiments, the TCRβV-binding moiety comprises a VH comprising the sequence of SEQ ID NO: 541 and a VL comprising the sequence of SEQ ID NO: 3527.

[0103] In some embodiments, the TCRβV-binding moiety comprises an scFv comprising the sequence of SEQ ID NO: 1346 operatively linked to the sequence of SEQ ID NO: 1349 via a linker comprising the sequence of SEQ ID NO. 3801.

[0104] In some embodiments, the TCRβV-binding moiety comprises an scFv comprising the sequence of SEQ ID NO: 541 operatively linked to the sequence of SEQ ID NO: 3527 via a linker comprising the sequence of SEQ ID NO: 3801.

[0105] In some embodiments, the TCRβV-binding moiety comprises an scFv comprising a sequence having at least 70% sequence identity to the sequence of SEQ ID NO: 1331 or the sequence of SEQ ID NO: 1376.

[0106] In some embodiments, the TCRβV-binding moiety comprises an scFv comprising the sequence of SEQ ID NO: 1331 or the sequence of SEQ ID NO: 1376.

[0107] In some embodiments, the multifunctional molecule consists of a first polypeptide chain, a second polypeptide chain, and a third polypeptide chain, wherein:
[0108] (i) the first polypeptide chain comprises the sequence of SEQ ID NO: 523, and the sequence of SEQ ID NO: 3649;
[0109] (ii) the second polypeptide chain comprises the sequence of SEQ ID NO: 1331, the sequence of SEQ ID NO: 2270, and the sequence of SEQ ID NO: 3648; and
[0110] (iii) the third polypeptide chain comprises the sequence of SEQ ID NO: 527, and the sequence of SEQ ID NO: 3644.

[0111] In some embodiments, the multifunctional molecule consists of a first polypeptide chain, a second polypeptide chain, and a third polypeptide chain, wherein:
[0112] (i) the first polypeptide chain comprises the sequence of SEQ ID NO: 523 operatively linked to the sequence of SEQ ID NO: 3649;
[0113] (ii) the second polypeptide chain comprises the sequence of SEQ ID NO: 1331 operatively linked to the sequence of SEQ ID NO: 2270 operatively linked to the sequence of SEQ ID NO: 3648; and
[0114] (iii) the third polypeptide chain comprises the sequence of SEQ ID NO: 527 operatively linked to the sequence of SEQ ID NO: 3644.

[0115] In some embodiments, the multifunctional molecule consists of a first polypeptide chain, a second polypeptide chain, and a third polypeptide chain, wherein:
[0116] (i) the first polypeptide chain comprises a sequence having at least 70% sequence identity to the sequence of SEQ ID NO: 501;
[0117] (ii) the second polypeptide chain comprises a sequence having at least 70% sequence identity to the sequence of SEQ ID NO: 3800; and
[0118] (iii) the third polypeptide chain comprises a sequence having at least 70% sequence identity to the sequence of SEQ ID NO: 502.

[0119] In some embodiments, the multifunctional molecule consists of a first polypeptide chain, a second polypeptide chain, and a third polypeptide chain, wherein:
[0120] (i) the first polypeptide chain comprises the sequence of SEQ ID NO: 501;
[0121] (ii) the second polypeptide chain comprises the sequence of SEQ ID NO: 3800; and
[0122] (iii) the third polypeptide chain comprises the sequence of SEQ ID NO: 502.

[0123] In some embodiments, the multifunctional molecule consists of a first polypeptide chain, a second polypeptide chain, and a third polypeptide chain, wherein:
[0124] (i) the first polypeptide chain comprises a first sequence of SEQ ID NO: 523, a second sequence of SEQ ID NO: 523, and the sequence of SEQ ID NO: 3649;
[0125] (ii) the second polypeptide chain comprises the sequence of SEQ ID NO: 1331, the sequence of SEQ ID NO: 2270, and the sequence of SEQ ID NO: 3648; and
[0126] (iii) the third polypeptide chain comprises the sequence of SEQ ID NO: 527, and the sequence of SEQ ID NO: 3644.

[0127] In some embodiments, the multifunctional molecule consists of a first polypeptide chain, a second polypeptide chain, and a third polypeptide chain, wherein:
[0128] (i) the first polypeptide chain comprises the first sequence of SEQ ID NO: 523 operatively linked to the second sequence of SEQ ID NO: 523 operatively linked to the sequence of SEQ ID NO: 3649;
[0129] (ii) the second polypeptide chain comprises the sequence of SEQ ID NO: 1331 operatively linked to the sequence of SEQ ID NO: 2270 operatively linked to the sequence of SEQ ID NO: 3648; and
[0130] (iii) the third polypeptide chain comprises the sequence of SEQ ID NO: 527 operatively linked to the sequence of SEQ ID NO: 3644.

[0131] In some embodiments, the multifunctional molecule consists of a first polypeptide chain, a second polypeptide chain, and a third polypeptide chain, wherein:
[0132] (i) the first polypeptide chain comprises a sequence having at least 70% sequence identity to the sequence of SEQ ID NO: 590;
[0133] (ii) the second polypeptide chain comprises a sequence having at least 70% sequence identity to the sequence of SEQ ID NO: 3800; and
[0134] (iii) the third polypeptide chain comprises a sequence having at least 70% sequence identity to the sequence of SEQ ID NO: 502.

[0135] In some embodiments, the multifunctional molecule consists of a first polypeptide chain, a second polypeptide chain, and a third polypeptide chain, wherein:
[0136] (i) the first polypeptide chain comprises the sequence of SEQ ID NO: 590;
[0137] (ii) the second polypeptide chain comprises the sequence of SEQ ID NO: 3800; and
[0138] (iii) the third polypeptide chain comprises the sequence of SEQ ID NO: 502.

[0139] In some embodiments, the multifunctional molecule consists of a first polypeptide chain, a second polypeptide chain, and a third polypeptide chain, wherein:
[0140] (i) the first polypeptide chain comprises the sequence of SEQ ID NO: 537, and the sequence of SEQ ID NO: 559;
[0141] (ii) the second polypeptide chain comprises the sequence of SEQ ID NO: 1376, the sequence of SEQ ID NO: 2191, and the sequence of SEQ ID NO: 3533; and
[0142] (iii) the third polypeptide chain comprises the sequence of SEQ ID NO: 561, and the sequence of SEQ ID NO: 558.

[0143] In some embodiments, the multifunctional molecule consists of a first polypeptide chain, a second polypeptide chain, and a third polypeptide chain, wherein:
[0144] (i) the first polypeptide chain comprises the sequence of SEQ ID NO: 537 operatively linked to the sequence of SEQ ID NO: 559;
[0145] (ii) the second polypeptide chain comprises the sequence of SEQ ID NO: 1376 operatively linked to the sequence of SEQ ID NO: 2191 operatively linked to the sequence of SEQ ID NO: 3533; and
[0146] (iii) the third polypeptide chain comprises the sequence of SEQ ID NO: 561 operatively linked to the sequence of SEQ ID NO: 558.

[0147] In some embodiments, the multifunctional molecule consists of a first polypeptide chain, a second polypeptide chain, and a third polypeptide chain, wherein:
[0148] (i) the first polypeptide chain comprises a sequence having at least 70% sequence identity to the sequence of SEQ ID NO: 509;
[0149] (ii) the second polypeptide chain comprises a sequence having at least 70% sequence identity to the sequence of SEQ ID NO: 511; and
[0150] (iii) the third polypeptide chain comprises a sequence having at least 70% sequence identity to the sequence of SEQ ID NO: 510.

[0151] In some embodiments, the multifunctional molecule consists of a first polypeptide chain, a second polypeptide chain, and a third polypeptide chain, wherein:
[0152] (i) the first polypeptide chain comprises the sequence of SEQ ID NO: 509;
[0153] (ii) the second polypeptide chain comprises the sequence of SEQ ID NO: 511; and
[0154] (iii) the third polypeptide chain comprises the sequence of SEQ ID NO: 510.

[0155] In some embodiments, the multifunctional molecule consists of a first polypeptide chain, a second polypeptide chain, and a third polypeptide chain, wherein:
[0156] (i) the first polypeptide chain comprises a first sequence of SEQ ID NO: 537, a second sequence of SEQ ID NO: 537, and the sequence of SEQ ID NO: 559;
[0157] (ii) the second polypeptide chain comprises the sequence of SEQ ID NO: 1376, the sequence of SEQ ID NO: 2191, and the sequence of SEQ ID NO: 3533; and
[0158] (iii) the third polypeptide chain comprises the sequence of SEQ ID NO: 561, and the sequence of SEQ ID NO: 558.

[0159] In some embodiments, the multifunctional molecule consists of a first polypeptide chain, a second polypeptide chain, and a third polypeptide chain, wherein:
[0160] (i) the first polypeptide chain comprises the first sequence of SEQ ID NO: 537 operatively linked to the second sequence of SEQ ID NO: 537 operatively linked to the sequence of SEQ ID NO: 559;
[0161] (ii) the second polypeptide chain comprises the sequence of SEQ ID NO: 1376 operatively linked to the sequence of SEQ ID NO: 2191 operatively linked to the sequence of SEQ ID NO: 3533; and
[0162] (iii) the third polypeptide chain comprises the sequence of SEQ ID NO: 561 operatively linked to the sequence of SEQ ID NO: 558.

[0163] In some embodiments, the multifunctional molecule consists of a first polypeptide chain, a second polypeptide chain, and a third polypeptide chain, wherein:
[0164] (i) the first polypeptide chain comprises a sequence having at least 70% sequence identity to the sequence of SEQ ID NO: 512;
[0165] (ii) the second polypeptide chain comprises a sequence having at least 70% sequence identity to the sequence of SEQ ID NO: 511; and
[0166] (iii) the third polypeptide chain comprises a sequence having at least 70% sequence identity to the sequence of SEQ ID NO: 510.

[0167] In some embodiments, the multifunctional molecule consists of a first polypeptide chain, a second polypeptide chain, and a third polypeptide chain, wherein:
[0168] (i) the first polypeptide chain comprises the sequence of SEQ ID NO: 512;
[0169] (ii) the second polypeptide chain comprises the sequence of SEQ ID NO: 511; and
[0170] (iii) the third polypeptide chain comprises the sequence of SEQ ID NO: 510.

[0171] In some embodiments, the multifunctional molecule consists of a first polypeptide chain, a second polypeptide chain, and a third polypeptide chain, wherein:
[0172] (i) the first polypeptide chain comprises the sequence of SEQ ID NO: 580, and the sequence of SEQ ID NO: 584;
[0173] (ii) the second polypeptide chain comprises the sequence of SEQ ID NO: 1376, the sequence of SEQ ID NO: 2191, and the sequence of SEQ ID NO: 3533; and
[0174] (iii) the third polypeptide chain comprises the sequence of SEQ ID NO: 585, and the sequence of SEQ ID NO: 3528.

[0175] In some embodiments, the multifunctional molecule consists of a first polypeptide chain, a second polypeptide chain, and a third polypeptide chain, wherein:
[0176] (i) the first polypeptide chain comprises the sequence of SEQ ID NO: 580 operatively linked to the sequence of SEQ ID NO: 584;
[0177] (ii) the second polypeptide chain comprises the sequence of SEQ ID NO: 1376 operatively linked to the sequence of SEQ ID NO: 2191 operatively linked to the sequence of SEQ ID NO: 3533; and
[0178] (iii) the third polypeptide chain comprises the sequence of SEQ ID NO: 585 operatively linked to the sequence of SEQ ID NO: 3528.

[0179] In some embodiments, the multifunctional molecule consists of a first polypeptide chain, a second polypeptide chain, and a third polypeptide chain, wherein:
[0180] (i) the first polypeptide chain comprises a sequence having at least 70% sequence identity to the sequence of SEQ ID NO: 519;
[0181] (ii) the second polypeptide chain comprises a sequence having at least 70% sequence identity to the sequence of SEQ ID NO: 511; and
[0182] (iii) the third polypeptide chain comprises a sequence having at least 70% sequence identity to the sequence of SEQ ID NO: 520.

[0183] In some embodiments, the multifunctional molecule consists of a first polypeptide chain, a second polypeptide chain, and a third polypeptide chain, wherein:
[0184] (i) the first polypeptide chain comprises the sequence of SEQ ID NO: 519;
[0185] (ii) the second polypeptide chain comprises the sequence of SEQ ID NO: 511; and
[0186] (iii) the third polypeptide chain comprises the sequence of SEQ ID NO: 520.

[0187] In some embodiments, the multifunctional molecule is a multispecific molecule.

[0188] In another aspect, provided herein is a polynucleotide comprising a sequence encoding the multifunctional molecule as provided herein.

[0189] In some embodiments, the polynucleotide is an isolated nucleic acid molecule.

[0190] In another aspect, provided herein is a vector comprising one or more of the polynucleotide as provided herein.

[0191] In another aspect, provided herein is a cell comprising the polynucleotide as provided herein, or the vector as provided herein.

[0192] In another aspect, provided herein is a pharmaceutical composition comprising the multifunctional molecule as provided herein, the polynucleotide as provided herein, the vector as provided herein, or the cell as provided herein, and a pharmaceutically acceptable carrier, excipient, or diluent.

[0193] In another aspect, provided herein is a method of treating a condition or disease in a subject in need therefor comprising administering to the subject a therapeutically effective amount of the multifunctional molecule as provided herein, the polynucleotide as provided herein, the vector as provided herein, the cell as provided herein, the pharmaceutical composition as provided herein, or any combination thereof, wherein the administering is effective to treat the condition or disease in the subject.

[0194] In some embodiments, the condition or disease is cancer.

[0195] In some embodiments, the cancer is a solid tumor, a hematological cancer, a metastatic cancer, a soft tissue tumor, or any combination thereof.

[0196] In some embodiments, the cancer is the solid tumor, and wherein the solid tumor is selected from the group consisting of melanoma, pancreatic cancer, breast cancer, colorectal cancer, lung cancer, skin cancer, ovarian cancer, liver cancer, and any combination thereof.

[0197] In some embodiments, the cancer is the hematological cancer, and wherein the hematological cancer is selected from the group consisting of Hodgkin's lymphoma, Non-Hodgkin's lymphoma, acute myeloid leukemia (AML), chronic myeloid leukemia, myelodysplastic syndrome, multiple myeloma, T-cell lymphoma, acute lymphocytic leukemia, and any combination thereof.

[0198] In some embodiments, the Non-Hodgkin's lymphoma is selected from the group consisting of B cell lymphoma, diffuse large B cell lymphoma (DLBCL), follicular lymphoma, chronic lymphocytic leukemia (B-CLL), mantle cell lymphoma, marginal zone B-cell lymphoma, Burkitt lymphoma, lymphoplasmacytic lymphoma, hairy cell leukemia, and any combination thereof.

[0199] In some embodiments, the T-cell lymphoma is peripheral T-cell lymphoma.

[0200] In some embodiments, the cancer is characterized by a cancer antigen present on the cancer.

[0201] In some embodiments, the cancer antigen is a tumor antigen, a stromal antigen, or a hematological antigen.

[0202] In some embodiments, the cancer antigen is selected from the group consisting of CD19, CD123, CD22, CD30, CD171, CS-1, C-type lectin-like molecule-1, CD33, epidermal growth factor receptor variant III (EGFRvIII), ganglioside G2 (GD2), ganglioside GD3, TNF receptor family member B cell maturation (BCMA), Tn antigen ((Tn Ag) or (GalNAcα-Ser/Thr)), prostate-specific membrane antigen (PSMA), Receptor tyrosine kinase-like orphan receptor 1 (ROR1), Fms-Like Tyrosine Kinase 3 (FLT3), Tumor-associated glycoprotein 72 (TAG72), CD38, CD44v6, Carcinoembryonic antigen (CEA), Epithelial cell adhesion molecule (EPCAM). B7H3 (CD276), KIT (CD117), Interleukin-13 receptor subunit alpha-2, mesothelin, Interleukin 11 receptor alpha (IL-11Ra), prostate stem cell antigen (PSCA), Protease Serine 21, vascular endothelial growth factor receptor 2 (VEGFR2), Lewis (Y) antigen, CD24, Platelet-derived growth factor receptor beta (PDGFR-beta), Stage-specific embryonic antigen-4 (SSEA-4), CD20, Folate receptor alpha, Receptor tyrosine-protein kinase ERBB2 (Her2/neu), Mucin 1, cell surface associated (MUC1), epidermal growth factor receptor (EGFR), neural cell adhesion molecule (NCAM), Prostase, prostatic acid phosphatase (PAP), elongation factor 2 mutated (ELF2M), Ephrin B2, fibroblast activation protein alpha (FAP), insulin-like growth factor 1 receptor (IGF-I receptor), carbonic anhydrase IX (CAIX), Proteasome (Prosome, Macropain) Subunit, Beta Type. 9 (LMP2), glycoprotein 100 (gp100/pmel17), oncogene fusion protein consisting of breakpoint cluster region (BCR) and Abelson murine leukemia viral oncogene homolog 1 (Abl) (bcr-abl), tyrosinase, ephrin type-A receptor 2 (EphA2), Fucosyl GM1, sialyl Lewis adhesion molecule (sLe), ganglioside GM3, transglutaminase 5 (TGS5), high molecular weight-melanoma-associated antigen (HMWMAA), o-acetyl-GD2 ganglioside (OAcGD2), Folate receptor beta, tumor endothelial marker 1 (TEM1/CD248), tumor endothelial marker 7-related (TEM7R), claudin 6 (CLDN6), thyroid stimulating hormone receptor (TSHR), G protein-coupled receptor class C group 5, member D (GPRC5D), chromosome X open reading frame 61 (CXORF61), CD97, CD179a, anaplastic lymphoma kinase (ALK), Polysialic acid, placenta-specific 1 (PLAC1), hexasaccharide portion of globoH glycoceramide (GloboH), mammary gland differentiation antigen (NY-BR-1), uroplakin 2 (UPK2), Hepatitis A virus cellular receptor 1 (HAVCR1), adrenoceptor beta 3 (ADRB3), pannexin 3 (PANX3), G protein-coupled receptor 20 (GPR20), lymphocyte antigen 6 complex, locus K 9 (LY6K), Olfactory receptor 51E2 (OR51E2), TCR Gamma Alternate Reading Frame Protein (TARP), Wilms tumor protein (WT1), Cancer/testis antigen 1 (NY-ESO-1/LAGE-1), Cancer/testis antigen 2 (LAGE-1a). Melanoma-associated antigen 1 (MAGE-A1), ETS translocation-variant gene 6, located on chromosome 12p (ETV6-AML), sperm protein 17 (SPA17), X Antigen Family, Member 1A (XAGE1), angiopoietin-binding cell surface receptor 2 (Tie 2), melanoma cancer testis antigen-1 (MAD-CT-1), melanoma cancer testis antigen-2 (MAD-CT-2), Fos-related antigen 1, tumor protein p53 (p53), p53 mutant, prostein. Survivin, telomerase, prostate carcinoma tumor antigen-1, melanoma antigen recognized by T cells 1, Rat sarcoma (Ras) mutant, human Telomerase reverse transcriptase (hTERT), sarcoma translocation breakpoints, melanoma inhibitor of apoptosis (ML-IAP), ERG (transmembrane protease, serine 2 (TMPRSS2) ETS fusion gene). N-Acetyl glucosaminyl-transferase V (NA17), paired box protein Pax-3 (PAX3). Androgen receptor. Cyclin B1, v-myc avian myelocytomatosis viral oncogene neuroblastoma derived homolog (MYCN), Ras Homolog Family Member C (RhoC), Tyrosinase-related protein 2 (TRP-2), Cytochrome P450 1B1 (CYP1B1), CCCTC-Binding Factor (Zinc Finger Protein)-Like. Squamous Cell Carcinoma Antigen Recognized By T Cells 3 (SART3), Paired box protein Pax-5 (PAX5), proacrosin binding protein sp32 (OY-TES1), lymphocyte-specific protein tyrosine kinase (LCK), A kinase anchor protein 4 (AKAP-4), synovial sarcoma, X breakpoint 2 (SSX2), Receptor for Advanced Glycation Endproducts (RAGE-1), renal ubiquitous 1 (RU1), renal ubiquitous 2 (RU2), legumain, human papilloma virus E6 (HPV E6), human papilloma virus E7 (HPV E7), intestinal carboxyl esterase, heat shock protein 70-2 mutated (mut hsp70-2), CD79a, CD79b, CD72, Leukocyte-associated immunoglobulin-like receptor 1 (LAIR1), Fc fragment of IgA receptor (FCAR or CD89), Leukocyte immunoglobulin-like receptor subfamily A member 2 (LILRA2), CD300 molecule-like family member f (CD300LF), C-type lectin domain family 12 member A (CLEC12A), bone marrow stromal cell antigen 2 (BST2), EGF-like module-containing mucin-like hormone receptor-like 2 (EMR2), lymphocyte antigen 75 (LY75), Glypican-3 (GPC3), Fc receptor-like 5 (FCRL5), FcRH5, PDL1, CD47, prostate specific membrane antigen (PMSA), prostate-specific antigen (PSA), Ron Kinase, c-Met, Immature laminin receptor, TAG-72, BING-4, Calcium-activated chloride channel 2, Cyclin-B1, 9D7, Ep-CAM, EphA3, SAP-1, PRAME, SSX-2, Melan-A/MART-1, TRP1/gp75, MC1R, β-catenin, BRCA1/2, CDK4, CML66, Fibronectin, Ras, TGF-B receptor, AFP, ETA, MAGE, CA-125, BAGE, GAGE, CDC27, α actinin-4, gangliosides, MART-2, MUC2, MUM1, MUM2, MUM3, NA88-1, NPM, OA1, OGT, RCC, RU11, RU12, SAGE, TRG, TSTA, L1-CAM, gpA33, GM2, VEGFR, Integrins, carbohydrates, TRAILR1, TRAILR2, RANKL, TGF-beta, hyaluronic acid, collagen, tenascin C, tenascin W, and immunoglobulin lambda-like polypeptide 1 (IGLL1).

[0203] In some embodiments, the method as provided herein further comprises administering a second therapeutic agent or therapy to the subject.

[0204] In some embodiments, the second therapeutic agent or therapy comprises a chemotherapeutic agent, a biologic agent, a hormonal therapy, radiation, or surgery.

[0205] In some embodiments, the second therapeutic agent or therapy is administered in combination with the multifunctional molecule as provided herein, the polynucleotide as provided herein, the vector as provided herein, the cell as provided herein, the pharmaceutical composition as provided herein, sequentially, simultaneously, or concurrently.

### INCORPORATION BY REFERENCE

[0206] All publications, patents, and patent applications mentioned in this specification are herein incorporated by reference to the same extent as if each individual publication, patent, or patent application was specifically and individually indicated to be incorporated by reference.

### BRIEF DESCRIPTION OF THE DRAWINGS

[0207] The novel features of the disclosure are set forth with particularity in the appended claims. A better understanding of the features and advantages of the present disclosure will be obtained by reference to the following detailed description that sets forth illustrative embodiments, in which the principles of the disclosure are utilized, and the accompanying drawings of which:

[0208] FIGS. 1A-IT depict exemplary embodiments of multifunctional molecules as described herein. FIGS. 1A, 1B and 1C depict exemplary embodiments of multifunctional molecules containing multiple, e.g., two, molecules of an exemplary cytokine, interleukin-2 (IL-2), linked to an antibody molecule that binds to a T cell receptor beta variable region (TCRβV) (“anti-TCRβV antibody molecule”). FIGS. 1D, 1E and IF depict exemplary embodiments of multifunctional molecules containing a single molecule of an exemplary cytokine, IL-2, linked to an anti-TCRβV antibody molecule. FIGS. 1G, 1H, 1I, and 1J depict exemplary embodiments of multifunctional molecules containing an exemplary cytokine, IL-2, linked to a first dimerization module. FIGS. 1K, 1L and 1M depict exemplary embodiments of multifunctional molecules containing an exemplary dimerization module, e.g., an Fc region comprising a N297A mutation, and multiple. e.g., two, molecules of an exemplary cytokine, IL-2, linked to an anti-TCRβV antibody molecule. FIGS. 1N, 1O and 1P depict exemplary embodiments of multifunctional molecules containing an exemplary dimerization module, e.g., an Fc region comprising a N297A mutation (Knob-in-hole), and a single molecule of an exemplary cytokine, IL-2, linked to an anti-TCRβV antibody molecule. FIGS. 1Q, 1R, 1S and 1T depict exemplary embodiments of multifunctional molecules containing an exemplary dimerization module. e.g., an Fc region comprising a N297A mutation (Knob-in-hole), and an exemplary cytokine, IL-2, linked to the exemplary dimerization module.

[0209] FIGS. 2A-2B shows the alignment of the Antibody A source mouse VH and VL framework 1, CDR 1, framework 2, CDR 2, framework 3, CDR3, and framework 4 regions with their respective humanized sequences. Kabat CDRs are shown in bold, Chothia CDRs are shown in italics, and combined CDRs are shown in boxes. The framework positions that were back mutated are double underlined. FIG. 2A shows VH sequences for murine Antibody A (SEQ ID NO: 1) and humanized Antibody A-H (SEQ ID NO: 9). FIG. 2B shows VL sequences for murine Antibody A (SEQ ID NO: 2) and humanized Antibody A-H (SEQ ID NO: 10 and SEQ ID NO: 11).

[0210] FIGS. 3A-3B shows the alignment of the Antibody B source mouse VH and VL framework 1, CDR 1, framework 2, CDR 2, framework 3, CDR3, and framework 4 regions with their respective humanized sequences. Kabat CDRs are shown in bold. Chothia CDRs are shown in italics, and combined CDRs are shown in boxes. The framework positions that were back mutated are double underlined. FIG. 3A shows the VH sequence for murine Antibody B (SEQ ID NO: 15) and humanized VH sequences B-H.1A to B-H.1C (SEQ ID NOs: 23-25). FIG. 3B shows the VL sequence for murine Antibody B (SEQ ID NO: 16) and humanized VL sequences B-H.1D to B-H.1H (SEQ ID NOs: 26-30).

[0211] FIG. 4 depicts the phylogenetic tree of TCRβV gene family and subfamilies with corresponding antibodies mapped. Subfamily identities are as follows: Subfamily A: TCRβ V6; Subfamily B: TCRβ V10; Subfamily C: TCRβ V12; Subfamily D: TCRβ V5; Subfamily E: TCRβ V7; Subfamily F: TCRβ V11; Subfamily G: TCRβ V14; Subfamily H: TCRβ V16; Subfamily I: TCRβ V18; Subfamily J: TCRβ V9; Subfamily K: TCRβ V13; Subfamily L: TCRβ V4; Subfamily M: TCRβ V3; Subfamily N: TCRβ V2; Subfamily O: TCRβ V15; Subfamily P: TCRβ V30; Subfamily Q: TCRβ V19; Subfamily R: TCRβ V27; Subfamily S: TCRβ V28; Subfamily T: TCRβ V24; Subfamily U: TCRβ V20; Subfamily V: TCRβ V25; and Subfamily W: TCRβ V29 subfamily. Subfamily members are described in detail herein in the Section titled “TCR beta V (TCRβV)”.

[0212] FIGS. 5A-5C show human CD3+ T cells activated by anti-TCR Vβ13.1 antibody (A-H.1) for 6-days. Human CD3+ T cells were isolated using magnetic-bead separation (negative selection) and activated with immobilized (plate-coated) anti-TCR Vβ13.1 (A-H.1) or anti-CD3ε (OKT3) antibodies at 100 nM for 6 days. FIG. 5A shows two scatter plots (left: activated with OKT3; and right: activated with A-H.1) of expanded T cells assessed for TCR Vβ13.1 surface expression using anti-TCR Vβ13.1 (A-H.1) followed by a secondary fluorochrome-conjugated antibody for flow cytometry analysis. FIG. 5B shows percentage (%) of TCR Vβ13.1 positive T cells activated by anti-TCR Vβ13.1 (A-H.1) or anti-CD3e (OKT3) plotted against total T cells (CD3+). FIG. 5C shows relative cell count acquired by counting the number of events in each T cell subset gate (CD3 or TCR Vβ13.1) for 20 seconds at a constant rate of 60 μl/min. Data shown as mean value from 3 donors.

[0213] FIGS. 6A-6B show cytolytic activity of human CD3+ T cells activated by anti-TCR Vβ13.1 antibody (A-H.1) against transformed cell line RPMI 8226. FIG. 6A depicts target cell lysis of human CD3+ T cells activated with A-H.1 or OKT3. Human CD3+ T cells were isolated using magnetic-bead separation (negative selection) and activated with immobilized (plate-coated) A-H.1 or OKT3 at the indicated concentrations for 4 days prior to co-culture with RPMI 8226 cells at a (E:T) ratio of 5:1 for 2 days. Samples were next analyzed for cell lysis of RPMI 8226 cells by FACS staining for CFSE/CD138-labeled, and membrane-impermeable DNA dyes (DRAQ7) using flow cytometry analysis FIG. 6B shows target cell lysis of human CD3+ T cells activated with A-H.1 or OKT3 incubated with RPMI-8226 at a (E:T) ratio of 5:1 for 6 days followed by cell lysis analysis of RPMI 8226 cells as described above. Percentage (%) target cell lysis was determined by normalizing to basal target cell lysis (i.e. without antibody treatment) using the following formula. [(x−basal)/(100%−basal), where x is cell lysis of sample]. Data shown is a representative of n=1 donor.

[0214] FIGS. 7A-7B show IFNγ production by human PBMCs activated with the indicated antibodies. Human PBMCs were isolated from whole blood from the indicated number of donors, followed by solid-phase (plate-coated) stimulation with the indicated antibodies at 100 Nm. Supernatant was collected on Days 1, 2, 3, 5, or 6. FIG. 7A is a graph comparing the production of IFNγ in human PBMCs activated with the antibodies indicated activated with anti-TCR Vβ13.1 antibodies (A-H.1 or A-H.2) or anti-CD3e antibodies (OKT3 or SP34-2) on Day 1, 2, 3, 5, or 6 post-activation. FIG. 7B shows IFNγ production in human PBMCs activated with the antibodies indicated activated with the indicated anti-TCR Vβ13.1 antibodies or anti-CD3e antibody (OKT3) on Day 1, 2, 3, 5, or 6 post-activation.

[0215] FIGS. 8A-8B show IL-2 production by human PBMCs activated with the indicated antibodies. A similar experimental setup as described for FIGS. 7A-7B was used.

[0216] FIGS. 9A-9B show IL-6 production by human PBMCs activated with the indicated antibodies. A similar experimental setup as described for FIGS. 7A-7B was used.

[0217] FIGS. 10A-10B show TNF-alpha production by human PBMCs activated with the indicated antibodies. A similar experimental setup as described for FIGS. 7A-7B was used.

[0218] FIGS. 11A-11B show IL-1beta production by human PBMCs activated with the indicated antibodies. A similar experimental setup as described for FIGS. 7A-7B was used.

[0219] FIGS. 12A-12B are graphs showing delayed kinetics of IFNγ secretion in human PMBCs activated by anti-TCR Vβ13.1 antibody A-H.1 when compared to PBMCs activated by anti-CD3e antibody OKT3. FIG. 12A shows IFNγ secretion data from 4 donors. FIG. 12B shows IFNγ secretion data from 4 additional donors. Data shown is representative of n=8 donors.

[0220] FIG. 13 depicts increased CD8+ TSCM and Temra T cell subsets in human PBMCs activated by anti-TCR Vβ13.1 antibodies (A-H.1 or A-H.2) compared to PBMCs activated by anti-CD3e antibodies (OKT3 or SP34-2).

[0221] FIGS. 14A-14F show characterization of an anti-TCRVb antibody. FIG. 14A is a graph depicting proliferation of T cells activated with anti-CD3 (OKT3) antibody or anti-TCRVb antibody. FIG. 14B shows selective expansion of CD45RA+ effector memory CD8+ and CD4+ T cells (TEMRA) cells with anti-TCRVb antibodies. Tn=naïve T cell: Tscm=stem cell memory T cell: Tcm=central memory T cell; Tem=effector memory T cell: Temra=effector memory CD45RA+ T cell. FIG. 14C is a graph showing IFN-g secretion by PBMCs stimulated with an anti-TCRVb antibody, or anti-CD3 antibodies. FIG. 14D shows target cell lysis by T cells stimulated with an anti-TCRVb antibody, or anti-CD3 antibodies. Cells were stimulated for 4 days followed by 2 days incubation with multiple myeloma target cells for assessment of cell killing. FIG. 14E is a graph showing perforin secretion by T cells stimulated with an anti-TCRVb antibody, or an anti-CD3 antibody. Perforin was analyzed by FACS staining in TCRVB-positive and TCRVB-negative T cells in PBMCs after 5 days of stimulation with 100 ng/ml plate-bound antibody. FIG. 14F is a graph showing Granzyme B by T cells stimulated with an anti-TCRVb antibody, or an anti-CD3 antibody. Granzyme B was analyzed by FACS staining in TCRVB-positive and TCRVB-negative T cells in PBMCs after 5 days of stimulation with 100 ng/ml plate-bound antibody.

[0222] FIGS. 15A-15B show production of IL-2 and IL-15 and expansion of human NK cells by stimulation of PBMCs with anti-TCRVb antibody for 6 days at a dose of 100 nM. FIG. 15A shows secretion of IL-2 or IL-15 in T cells stimulated with an anti-TCRVb antibody, or anti-CD3 antibodies. FIG. 15B depicts flow cytometry dot plots showing NKp46 staining vs CD56 antibody staining in cells stimulated with an anti-TCRVb antibody or an anti-CD3 antibody or a control sample.

[0223] FIGS. 16A-16C show secretion of cytokines in PBMCs stimulated with an anti-TCRVb antibody, or anti-CD3 antibodies.

[0224] FIGS. 17A-17B show killing of MM cells by dual targeting BCMA-TCRvb antibody molecules. FIG. 17A shows in vitro killing by one of the following dual-targeting antibody molecules: BCMA-TCRVb (Molecule I), BCMA-CD3, or Control-TCRVb; or an isotype control. FIG. 17B shows in vivo killing of MM cells by a dual-targeting BCM-TCRVb antibody (Molecule I).

[0225] FIG. 18 shows lysis of MM target cells with a dual targeting antibody (Molecule E) which recognized FcRH5 on one arm and TCRVb on the other arm.

[0226] FIGS. 19A-19B demonstrate cytokine production from human PBMCs activated by anti-TCR Vβ8a antibodies (B-H.1) when compared to those activated by anti-CD3e antibodies (OKT3 or SP34-2). FIG. 19A shows that human PBMCs activated by anti-TCR Vβ8a antibodies (B-H.1) produce similar or reduced levels of IFNγ. FIG. 19B shows human PBMCs activated by anti-TCR Vβ8a antibodies (B-H.1) produce higher levels of IL-2 when compared to those activated by anti-CD3ε antibodies (OKT3 or SP34-2). Data shown is representative of n=6 donors.

[0227] FIGS. 20A-20C demonstrate cytokine production from human PBMCs activated by anti-TCR Vβ8a antibodies (B-H.1). Human PBMCs activated by anti-TCR Vβ8a antibodies (B-H.1) do not significantly produce IL-6 (FIG. 20A), IL1β (FIG. 20B), and less TNFα (FIG. 20C), when compared to PBMCs activated by anti-CD3e antibodies (OKT3 or SP34-2). Data shown is representative of n=6 donors.

[0228] FIGS. 21A-21E demonstrate cytokine production from human PBMCs activated by anti-TCRβV Antibody D antibody compared to control anti-CD3e antibody (OKT3). FIG. 21A shows that human PBMCs activated by anti-TCRβV Antibody D antibody produce similar or reduced levels of IFNγ. FIG. 21B shows human PBMCs activated by anti-TCRβV Antibody D antibody produce higher levels of IL-2 when compared to those activated by anti-CD3ε antibodies (OKT3). Human PBMCs activated by anti-TCRβV Antibody D antibody do not significantly produce IL-1beta (FIG. 21C), IL-6. (FIG. 21D), or TNFalpha (FIG. 21E) Data shown is representative of n=4 donors.

[0229] FIGS. 22A-22B demonstrate cytokine production from human PBMCs activated by anti-TCR Vβ5 antibody (Antibody E). FIG. 22A shows that human PBMCs activated by anti-TCR Vβ5 antibody produce similar or reduced levels of IFNγ compared to PBMCS activated by anti-CD3ε antibodies (OKT3 or SP34-2). FIG. 22B shows human PBMCs activated by the anti-TCR Vβ5 1 antibody produce higher levels of IL-2 when compared to those activated by anti-CD3e antibodies (OKT3 or SP34-2). Data shown is representative of n=4 donors.

[0230] FIGS. 23A-23D demonstrate cytokine production from human PBMCs activated by an anti-TCR Vβ5 antibody (Antibody E). Human PBMCs activated by anti-TCR Vβ5 antibody do not significantly produce IL-1beta (FIG. 23A), IL-6, (FIG. 23B). TNFalpha (FIG. 23C), or IL-10 (FIG. 23D) as compared to PBMCs activated by anti-CD3e antibodies (OKT3 or SP34-2). Data shown is representative of n=4 donors.

[0231] FIGS. 24A-24F demonstrate cytokine production from human PBMCs activated by a dual targeting (bispecific molecule) comprising an anti-TCRβV binding moiety and a BCMA binding moiety. FIG. 24A shows that human PBMCs activated by the bispecific molecule produce similar or reduced levels of IFNγ as PBMCS activated by anti-CD3e antibodies (OKT3). FIG. 24B shows human PBMCs activated by the bispecific molecule produce higher levels of IL-2 when compared to PBMCs activated by anti-CD3ε antibodies (OKT3). Human PBMCs activated by the bispecific molecule do not significantly produce IL-1beta (FIG. 24C), IL-6, (FIG. 24D). TNFalpha (FIG. 24E), or IL-10 (FIG. 24F). Data shown is representative of n=3 donors.

[0232] FIGS. 25A-25B show the structure and sequence of eight TCRβV proteins from seven different subfamilies: TCRβV6 subfamily (TCRβV6-5 and TCRβV6-4 are shown), TCRβV28 subfamily, TCRβV19 subfamily, TCRβV9 subfamily, TCRβV5 subfamily, TCRβV20 subfamily and TCRβV12 subfamily. FIG. 25A shows the structural alignment of the different TCRβV proteins. The circled area represents the outward facing region comprising the proposed binding site for the anti-TCRβV antibodies as described herein. FIG. 25B shows the amino acid sequence alignment of the proteins shown in FIG. 25A (SEQ ID NOS 3449-3456, respectively, in order of appearance). The various TCRβV proteins (from 7 different TCRβV subfamilies) have diverse sequences but share a conserved (similar) structure and function.

[0233] FIGS. 26A-26J show cytokine or chemokine secretion of PBMCs activated with anti-TCRVb antibodies (A-H.1, B-H.1), a bispecific molecule comprising an anti-TCRVb antibody (Molecule H), control isotype (122) or anti-CD3e antibody (OKT3). Data shown is representative of n=2 donors and representative of 2 independent experiments.

[0234] FIGS. 27A-27H show cytokine or chemokine secretion of PBMCs activated with anti-TCRVb antibodies (A-H.1, B-H.1), a bispecific molecule comprising an anti-TCRVb antibody (Molecule H), control isotype (122) or anti-CD3e antibody (OKT3). Data shown is representative of n=2 donors and representative of 2 independent experiments.

[0235] FIGS. 28A-28L show cytokine or chemokine secretion of PBMCs activated with anti-TCRVb antibodies (A-H.1, B-H.1), a bispecific molecule comprising an anti-TCRVb antibody (Molecule H), control isotype (122) or anti-CD3e antibody (OKT3). Data shown is representative of n=2 donors and representative of 2 independent experiments.

[0236] FIG. 29 is a graph depicting mean tumor volume in NOD/SCID/IL-2Rγnull (NSG) mice engrafted with Raji-luc cells at days 10 to 28. The Star denotes PBMC implantation. Open triangles denote antibody treatment with the indicated antibodies.

[0237] FIGS. 30A-30F are graphs showing cytokine secretion stimulated by anti-TRBC1 (Antibody F) or anti-CD3 (OKT3) at Days 2 and 5. Cytokines examined include: IFNγ (FIG. 30A), IL-2 (FIG. 30B), IL-1β (FIG. 30C), IL-6 (FIG. 30D), IL-10 (FIG. 30E), and TNFα (FIG. 31F).

[0238] FIG. 31 is a FACS plot showing the expansion of TCRvb 6-5+ T cells over 8 days using anti-TCRvb 6-5 v1.

[0239] FIG. 32 is a bar graph showing the expansion of TCRvb 6-5+ CD4+ T cells and TCRvb 6-5+ CD8+ T cells over 8 days using the anti-CD3ε antibody OKT3 (100 nM).

[0240] FIG. 33 is a bar graph showing the expansion of TCRvb 6-5+ CD4+ T cells and TCRvb 6-5+ CD8+ T cells over 8 days using the anti-TCRvb 6-5 v1 antibody (100 nM).

[0241] FIG. 34 is a FACS plot showing the showing the expansion of TCRvb 6-5+ T cells over 8 days using anti-TCRvb 6-5 v1 or the anti-CD3ε antibody OKT3.

[0242] FIG. 35A is a bar graph showing the percentage of TCRβV 6-5+ T cells in PBMC cultures after 8 days of culture with the indicated antibody. Data for 5 replicates are shown. FIG. 35B is a bar graph showing the percentage of TCRβV 6-5+ T cells in purified T cell cultures after 8 days of culture with the indicated antibody. Data for 5 replicates are shown.

[0243] FIG. 36A is a bar graph showing the relative count of TCRβV 6-5+ T cells in PBMC culture after 8 days of culture with the indicated antibody. FIG. 36B is a bar graph showing the relative count of TCRβV 6-5+ T cells in PBMC culture after 8 days of culture with the indicated antibody.

[0244] FIG. 37A is a bar graph showing the relative count of TCRβV 6-5+ T cells in a purified T cell culture after 8 days of culture with the indicated antibody. FIG. 37B is a bar graph showing the relative count of TCRβV 6-5+ T cells in a purified T cell culture after 8 days of culture with the indicated antibody.

[0245] FIG. 38 is a line graph showing the total CD3+ T cell count (fold increase) after 8 days of T cell culture with either the anti-CD3ε antibody OKT3 or the anti-TCRvb 6-5 v1 antibody.

[0246] FIG. 39 is a series of line graphs showing the kinetics of target cells by TCRβV 6-5 v1 activated T cells or anti-CD3ε (OKT3) activated T cells. T cells from three different donors were utilized (donor 6769, donor 9880, donor 5411).

[0247] FIG. 40A is a scatter plot showing the percent of target cell lysis by T cells by TCRβV 6-5 v1 activated T cells or anti-CD3ε (OKT3) activated T cells without T cell pre activation. The data is presented at day 6 of co-culture between target cells and effector T cells. FIG. 40B is a scatter plot showing the percent of target cell lysis by T cells by TCRβV 6-5 v1 activated T cells or anti-CD3ε (OKT3) activated T cells with 4 days of T cell pre activation. The data is presented at day 2 of co-culture between target cells and effector T cells (after 4 days of T cell pre-activation).

[0248] FIG. 41 is a scatter plot showing the percent of target cell lysis by T cells by TCRβV 6-5 v1 activated T cells or anti-CD3ε (OKT3) activated T cells with 4 days of T cell pre activation. The data is presented at day 2 of co-culture between target cells and effector T cells (after 4 days of T cell pre-activation).

[0249] FIG. 42 is a bar graph showing target cell lysis by T cells by TCRβV 6-5 v1 activated T cells or anti-CD3ε (OKT3) activated T cells (100 nM each antibody). The data includes seven replicates of each experimental condition.

[0250] FIG. 43 is a series of FACS plots that show the cell surface expression of CD3ε on CD4+ TCRβV 6-5⁻ or CD4+ TCRβV 6-5⁺ T cells activated with either SP34-2 (anti-CD3ε antibody) or anti-TCRβV 6-5 v1 (anti-TCRβV 6-5 antibody) at days 0, 1, 2, 4, 6, or 8 post antibody activation.

[0251] FIG. 44 is a series of FACS plots that show the cell surface expression of CD3ε on CD8+ TCRβV 6-5⁻ or CD8+ TCRβV 6-5⁺ T cells activated with either SP34-2 (anti-CD3ε antibody) or anti-TCRβV 6-5 v1 (anti-TCRβV 6-5 antibody) at days 0, 1, 2, 4, 6, or 8 post antibody activation.

[0252] FIG. 45 is a series of FACS plots that show the cell surface expression of TCRβV on CD4+ TCRβV 6-5⁻ or CD4+ TCRβV 6-5⁺ T cells activated with either SP34-2 (anti-CD3ε antibody) or anti-TCRβV 6-5 v1 (anti-TCRβV 6-5 antibody) at days 0, 1, 2, 4, 6, or 8 post antibody activation.

[0253] FIG. 46 is a series of FACS plots that show the cell surface expression of TCRβV on CD8+ TCRβV 6-5⁻ or CD8+ TCRβV 6-5⁺ T cells activated with either SP34-2 (anti-CD3ε antibody) or anti-TCRβV 6-5 v1 (anti-TCRβV 6-5 antibody) at days 0, 1, 2, 4, 6, or 8 post antibody activation.

[0254] FIG. 47A shows FACS plot of TCRβV 6-5⁺ cynomolgus T cell expansion either unstimulated (left) or stimulated with anti-TCRβV 6-5 v1 (right) 7 days post activation of cynomolgus PBMCs from Donor DW8N (fresh PBMC sample, male, age 8, weight 7.9 kgs) were used. FIG. 47B shows FACS plot of TCRβV 6-5⁺ cynomolgus T cell expansion either unstimulated (left) or stimulated with anti-TCRβV 6-5 v1 (right) 7 days post activation of cynomolgus PBMCs. PBMCs from Donor G709 (cryopreserved sample, male, age 6, weight 4.7 kgs) were used.

[0255] FIG. 48 shows FACS plot and corresponding microscopy images of TCRβV 6-5⁺ cynomolgus T cell expansion either unstimulated (left), stimulated with SP34-2 (anti-CD3ε antibody) (middle); or stimulated with anti-TCRβV 6-5 v1 (right) post activation of cryopreserved donor DW8N cynomolgus PBMCs. The microscopy images show the cell cluster formation (indicated by circles).

[0256] FIG. 49 shows a schematic of FACS plot showing the FACS gating/staining of PBMCs prior γδ T cell purification.

[0257] FIG. 50 shows a schematic of FACS plot showing the FACS gating/staining of purified γδ T cell population.

[0258] FIG. 51 show activation of purified γδ T cell population with anti-CD3ε antibody (SP34-2) (left) or anti-TCRβV antibody (anti-TCRβV 6-5 v1) (right).

[0259] FIG. 52A shows the release of IFNγ from purified γδ T cell populations activated with anti-CD3ε antibody (SP34-2), anti-TCRβV antibody (anti-TCRβV 6-5 v1), or unstimulated. FIG. 52B shows the release of TNFα from purified γδ T cell populations activated with anti-CD3ε antibody (SP34-2), anti-TCRβV antibody (anti-TCRβV 6-5 v1), or unstimulated. FIG. 52C shows the release of IL-2 from purified γδ T cell populations activated with anti-CD3ε antibody (SP34-2), anti-TCRβV antibody (anti-TCRβV 6-5 v1), or unstimulated. FIG. 52D shows the release of IL-17A from purified γδ T cell populations activated with anti-CD3ε antibody (SP34-2), anti-TCRβV antibody (anti-TCRβV 6-5 v1), or unstimulated. FIG. 52E shows the release of IL-1a from purified γδ T cell populations activated with anti-CD3ε antibody (SP34-2), anti-TCRβV antibody (anti-TCRβV 6-5 v1), or unstimulated. FIG. 52F shows the release of IL-1β from purified γδ T cell populations activated with anti-CD3ε antibody (SP34-2), anti-TCRβV antibody (anti-TCRβV 6-5 v1), or unstimulated FIG. 52G shows the release of IL-6 from purified γδ T cell populations activated with anti-CD3ε antibody (SP34-2), anti-TCRβV antibody (anti-TCRβV 6-5 v1), or unstimulated. FIG. 52H shows the release of IL-10 from purified γδ T cell populations activated with anti-CD3ε antibody (SP34-2), anti-TCRβV antibody (anti-TCRβV 6-5 v1), or unstimulated.

[0260] FIG. 53 shows the relative representations of all TCR alpha V segments (TRAV group of genes) and their variants (top), all TCR beta V segment 6-5 variants (TRBV6-5 gene) (bottom left), and all TCR beta V segments and variants excluding 6-5 (bottom right).

[0261] FIG. 54A is a FACS plot showing phenotypic markers of CD4+ T cells expanded with anti-TCRβV antibody (anti-TCRβV 6-5 v1). Defined phenotypes include TEMRA (top left). Naïve/TSCM (top right), TEM (bottom left), and TCM (bottom right). FIG. 54B is a FACS plot showing phenotypic markers of CD4+ T cells expanded with anti-CD3ε antibody (OKT3). Defined phenotypes include TEMRA (top left). Naïve/TSCM (top right), TEM (bottom left), and TCM (bottom right).

[0262] FIG. 55A is a FACS plot showing phenotypic markers of CD8+ T cells expanded with anti-TCRβV antibody (anti-TCRβV 6-5 v1). Defined phenotypes include TEMRA (top left), Naïve/TSCM (top right). TEM (bottom left), and TCM (bottom right). FIG. 55B is a FACS plot showing phenotypic markers of CD8+ T cells expanded with anti-CD3ε antibody (OKT3). Defined phenotypes include TEMRA (top left), Naïve/TSCM (top right). TEM (bottom left), and TCM (bottom right).

[0263] FIG. 56A is a bar graph showing the percentage of PD1 expressing CD4+ T cells from T cell cultures activated with anti-TCRβV antibody (anti-TCRβV 6-5 v1), anti-CD3ε antibody (OKT3), or unstimulated. FIG. 56B is a bar graph showing the percentage of PD1 expressing CD8+ T cells from T cell cultures activated with anti-TCRβV antibody (anti-TCRβV 6-5 v1), anti-CD3ε antibody (OKT3), or unstimulated.

[0264] FIG. 57A is a bar graph showing the expression of Ki-67 by CD4+ T cells from T cell cultures activated with anti-TCRβV antibody (anti-TCRβV 6-5 v1), anti-CD3ε antibody (OKT3), or unstimulated. FIG. 57B is a bar graph showing the expression of Ki-67 by CD8+ T cells from T cell cultures activated with anti-TCRβV antibody (anti-TCRβV 6-5 v1), anti-CD3ε antibody (OKT3), or unstimulated.

[0265] FIG. 58A is a FACS plot showing the percentage of TEMRA-like CD8+ T cells activated using anti-TCRβV antibody (anti-TCRβV 6-5 v1) that express CD57 (18.7%). FIG. 58B is a FACS plot showing the percentage of TEM-like CD8+ T cells activated using anti-CD3ε antibody (OKT3) that express CD57 (46.8%) and the percentage of TCM-like CD8+ T cells activated using anti-CD3ε antibody (OKT3) that express CD57 (18.9%).

[0266] FIG. 59 shows a series of FACS plots showing the expression of expression of CD27 and by CD4+ (top) or CD8+ (bottom) T cells from T cell cultures activated with anti-TCRβV antibody (anti-TCRβV 6-5 v1), anti-CD3ε antibody (OKT3), or unstimulated.

[0267] FIG. 60 shows a series of FACS plots showing the expression of expression of OX40, 41BB, and ICOS by CD4+ (top) or CD8+ (bottom) T cells from T cell cultures activated with anti-TCRβV antibody (anti-TCRβV 6-5 v1), anti-CD3ε antibody (OKT3), or unstimulated.

[0268] FIG. 61 shows a series of FACS plots showing the percentage of CD3+ (CD4 gated) TCRβV 6-5+ T cells 1, 2, 3, 4, 5, 6, and 8 days port activation with BCMA and the anti-TCR Vβ antibody anti-TCR Vβ 6-5 v1.

[0269] FIG. 62A shows a series of FACS plots showing the percentage of CD4+ T cells expanded using isotype control (IgG1 N297A), anti-TCRβV (anti-TCR Vβ 6-5 v1), or anti-CD3ε (OKT3) antibodies on day 0 post activation. FIG. 62B shows a series of FACS plots showing the percentage of CD4+ T cells expanded using isotype control (IgG1 N297A), anti-TCRβV (anti-TCR Vβ 6-5 v1), or anti-CD3ε (OKT3) antibodies on day 1 post activation FIG. 62C shows a series of FACS plots showing the percentage of CD4+ T cells expanded using isotype control (IgG1 N297A), anti-TCRβV (anti-TCR Vβ 6-5 v1), or anti-CD3ε (OKT3) antibodies on day 2 post activation. FIG. 62D shows a series of FACS plots showing the percentage of CD4+ T cells expanded using isotype control (IgG1 N297A), anti-TCRβV (anti-TCR Vβ 6-5 v1), or anti-CD3E (OKT3) antibodies on day 3 post activation. FIG. 62E shows a series of FACS plots showing the percentage of CD4+ T cells expanded using isotype control (IgG1 N297A), anti-TCRβV (anti-TCR Vβ 6-5 v1), or anti-CD3ε (OKT3) antibodies on day 4 post activation. FIG. 62F shows a series of FACS plots showing the percentage of CD4+ T cells expanded using isotype control (IgG1 N297A), anti-TCRβV (anti-TCR Vβ 6-5 v1), or anti-CD3ε (OKT3) antibodies on day 5 post activation. FIG. 62G shows a series of FACS plots showing the percentage of CD4+ T cells expanded using isotype control (IgG1 N297A), anti-TCRβV (anti-TCR Vβ 6-5 v1), or anti-CD3ε (OKT3) antibodies on day 6 post activation. FIG. 62H shows a series of FACS plots showing the percentage of CD4+ T cells expanded using isotype control (IgG1 N297A), anti-TCRβV (anti-TCR Vβ 6-5 v1), or anti-CD3ε (OKT3) antibodies on day 8 post activation.

[0270] FIG. 63A is a bar graph showing ATP production from glycolysis of T cell cultures activated with the indicated antibodies. FIG. 63B is a bar graph showing ATP production from oxidative phosphorylation of T cell cultures activated with the indicated antibodies.

[0271] FIG. 64 is a line graph showing the oxygen consumption rate (OCR) of T cells from about 0 to 75 minutes activated with the indicated antibody.

[0272] FIG. 65A shows the oxygen consumption rate (OCR) of T cells activated with the indicated antibody during basal respiration. FIG. 65B shows the oxygen consumption rate (OCR) of T cells activated with the indicated antibody during maximal respiration. FIG. 65C shows the oxygen consumption rate (OCR) of T cells activated with the indicated antibody during spare respiratory capacity. FIG. 65D is a line graph indicates the areas of basal respiration and maximal respiration as shown in FIG. 64A and FIG. 64B, respectively.

[0273] FIG. 66A is a bar graph showing ATP production from glycolysis of T cell cultures activated with anti-TCRβV 6-5 v1 and re-stimulated with the indicated antibody. FIG. 66B is a bar graph showing ATP production from oxidative phosphorylation of T cell cultures activated with anti-TCRβV 6-5 v1 and re-stimulated with the indicated antibody.

[0274] FIGS. 67A-67G are graphs showing expression of IFNγ (FIG. 67A), TNFα (FIG. 67E), IL-1α (FIG. 67B), IL-1β (FIG. 67C), IL-6 (CRS and neurotoxicity associated cytokines) (FIG. 67D) with BHM1710 (anti TCRVB), a reduced affinity anti CD3 antibody (TB) and the SP34 anti CD3e antibody, IL-10 (FIG. 67F), IL-17A (FIG. 67G).

[0275] FIG. 68 is a FACS plot showing the percentage of NK cells expanded from T cell cultures activated with the indicated antibody.

[0276] FIG. 69 is a bar graph showing the number of NK cells expanded from T cell cultures activated with the indicated antibody.

[0277] FIG. 70 shows a series of FACS plots showing NK cell proliferation induced by T cell cultures activated with the indicated antibody.

[0278] FIG. 71 is a schematic showing an assay described in Example for determining NK cell mediated lysis of target K562 cells.

[0279] FIG. 72 is a bar graph showing the percent target cell lysis mediated by NK cells activated by PBMC's activated with the indicated antibody.

[0280] FIG. 73 shows a series of FACS plots showing the proliferation of NK cells from PBMC cultures activated/expanded with the indicated antibody (isotype control or OKT3). PBMCs from three donors (D1, D2, and D3) were analyzed.

[0281] FIG. 74 shows a series of FACS plots showing the proliferation of NK cells from PBMC cultures activated/expanded with the indicated antibody (anti-TCRvβ 12-3/4 v1 or anti-TCRvβ 12-3/4 v2). PBMCs from three donors (D1, D2, and D3) were analyzed.

[0282] FIG. 75 shows a series of FACS plots showing the proliferation of NK cells from PBMC cultures activated/expanded with the indicated antibody (anti-TCRvβ 12-3/4 v3 or SP34-2). PBMCs from three donors (D1, D2, and D3) were analyzed.

[0283] FIG. 76 is a bar graph showing the level of secreted IFNγ by T cells activated/expanded with the indicated antibody (anti-TCRβV 6-5 v1. OKT3, or SP34) and cultured with said antibody for the indicated number of days (1, 3, or 5).

[0284] FIG. 77 is a bar graph showing the level of secreted IL-2 by T cells activated/expanded with the indicated antibody (anti-TCRβV 6-5 v1, OKT3, or SP34) and cultured with said antibody for the indicated number of days (1, 3, or 5).

[0285] FIG. 78 is a bar graph showing the level of secreted IL-15 by T cells activated/expanded with the indicated antibody (anti-TCRβV 6-5 v1, OKT3, or SP34) and cultured with said antibody for the indicated number of days (1, 3, or 5).

[0286] FIG. 79 is a bar graph showing the level of secreted IL-1β by T cells activated/expanded with the indicated antibody (anti-TCRβV 6-5 v1. OKT3, or SP34) and cultured with said antibody for the indicated number of days (1, 3, or 5).

[0287] FIG. 80 is a bar graph showing the level of secreted IL-6 by T cells activated/expanded with the indicated antibody (anti-TCRβV 6-5 v1, OKT3, or SP34) and cultured with said antibody for the indicated number of days (1, 3, or 5).

[0288] FIG. 81 is a bar graph showing the level of secreted IL-10 by T cells activated/expanded with the indicated antibody (anti-TCRβV 6-5 v1, OKT3, or SP34) and cultured with said antibody for the indicated number of days (1, 3, or 5).

[0289] FIG. 82 is a bar graph showing the level of the indicated cytokine secreted by T cells activated/expanded with the indicated antibody (anti-TCRβV 6-5 v1 or SP34). The data includes use of 17 individual PBMC donors.

[0290] FIG. 83A is a bar graph showing the level of secreted IFNγ by T cells activated/expanded with the indicated antibody (anti-TCRβV 6-5 v1 or OKT3) and cultured with said antibody for the indicated number of days (1, 2, 3, 5, or 6). FIG. 83B is a bar graph showing the level of secreted IL-1β by T cells activated/expanded with the indicated antibody (anti-TCRβV 6-5 v1 or OKT3) and cultured with said antibody for the indicated number of days (1, 2, 3, 5, or 6). FIG. 83C is a bar graph showing the level of secreted IL-4 by T cells activated/expanded with the indicated antibody (anti-TCRβV 6-5 v1 or OKT3) and cultured with said antibody for the indicated number of days (1, 2, 3, 5, or 6). FIG. 83D is a bar graph showing the level of secreted IL-6 by T cells activated/expanded with the indicated antibody (anti-TCRβV 6-5 v1 or OKT3) and cultured with said antibody for the indicated number of days (1, 2, 3, 5, or 6). FIG. 83E is a bar graph showing the level of secreted IL-10 by T cells activated/expanded with the indicated antibody (anti-TCRβV 6-5 v1 or OKT3) and cultured with said antibody for the indicated number of days (1, 2, 3, 5, or 6). FIG. 83F is a bar graph showing the level of secreted TNFα by T cells activated/expanded with the indicated antibody (anti-TCRβV 6-5 v1 or OKT3) and cultured with said antibody for the indicated number of days (1, 2, 3, 5, or 6). FIG. 83G is a bar graph showing the level of secreted IL-2 by T cells activated/expanded with the indicated antibody (anti-TCRβV 6-5 v1 or OKT3) and cultured with said antibody for the indicated number of days (1, 2, 3, 5, or 6).

[0291] FIG. 84A is a bar graph showing the level of secreted IFNγ by T cells activated/expanded with the indicated antibody (anti-TCRβV 6-5 v1, anti-TCRβV 6-5 v1. OKT3, SP34-2, or isotype control) and cultured with said antibody for the indicated number of days (1, 2, 3, 5, or 6) FIG. 84B is a bar graph showing the level of secreted IL-1β by T cells activated/expanded with the indicated antibody (anti-TCRβV 6-5 v1, anti-TCRβV 6-5 v1. OKT3, SP34-2, or isotype control) and cultured with said antibody for the indicated number of days (1, 2, 3, 5, or 6). FIG. 84C is a bar graph showing the level of secreted IL-4 by T cells activated/expanded with the indicated antibody (anti-TCRβV 6-5 v1, anti-TCRβV 6-5 v1. OKT3, SP34-2, or isotype control) and cultured with said antibody for the indicated number of days (1, 2, 3, 5, or 6). FIG. 84D is a bar graph showing the level of secreted IL-6 by T cells activated/expanded with the indicated antibody (anti-TCRβV 6-5 v1, anti-TCRβV 6-5 v1, OKT3, SP34-2, or isotype control) and cultured with said antibody for the indicated number of days (1, 2, 3, 5, or 6). FIG. 84E is a bar graph showing the level of secreted IL-10 by T cells activated/expanded with the indicated antibody (anti-TCRβV 6-5 v1, anti-TCRβV 6-5 v1, OKT3, SP34-2, or isotype control) and cultured with said antibody for the indicated number of days (1, 2, 3, 5, or 6). FIG. 84F is a bar graph showing the level of secreted TNFα by T cells activated/expanded with the indicated antibody (anti-TCRβV 6-5 v1, anti-TCRβV 6-5 v1, OKT3, SP34-2, or isotype control) and cultured with said antibody for the indicated number of days (1, 2, 3, 5, or 6). FIG. 84G is a bar graph showing the level of secreted IL-2 by T cells activated/expanded with the indicated antibody (anti-TCRβV 6-5 v1, anti-TCRβV 6-5 v1, OKT3, SP34-2, or isotype control) and cultured with said antibody for the indicated number of days (1, 2, 3, 5, or 6).

[0292] FIG. 85A is a bar graph showing the level of secreted IFNγ by T cells activated/expanded with the indicated antibody (anti-TCRβV 6-5 v1, anti-TCRβV 6-5 v1. OKT3, or SP34-2) and cultured with said antibody for the indicated number of days (1, 2, 3, 4, 5, 6, or 8). FIG. 85B is a bar graph showing the level of secreted IL-1β by T cells activated/expanded with the indicated antibody (anti-TCRβV 6-5 v1, anti-TCRβV 6-5 v1. OKT3, or SP34-2) and cultured with said antibody for the indicated number of days (1, 2, 3, 4, 5, 6, or 8). FIG. 85C is a bar graph showing the level of secreted IL-4 by T cells activated/expanded with the indicated antibody (anti-TCRβV 6-5 v1, anti-TCRβV 6-5 v1, OKT3, or SP34-2) and cultured with said antibody for the indicated number of days (1, 2, 3, 4, 5, 6, or 8). FIG. 85D is a bar graph showing the level of secreted IL-6 by T cells activated/expanded with the indicated antibody (anti-TCRβV 6-5 v1, anti-TCRβV 6-5 v1. OKT3, or SP34-2) and cultured with said antibody for the indicated number of days (1, 2, 3, 4, 5, 6, or 8). FIG. 85E is a bar graph showing the level of secreted IL-10 by T cells activated/expanded with the indicated antibody (anti-TCRβV 6-5 v1, anti-TCRβV 6-5 v1, OKT3, or SP34-2) and cultured with said antibody for the indicated number of days (1, 2, 3, 4, 5, 6, or 8). FIG. 85F is a bar graph showing the level of secreted TNFα by T cells activated/expanded with the indicated antibody (anti-TCRβV 6-5 v1, anti-TCRβV 6-5 v1. OKT3, or SP34-2) and cultured with said antibody for the indicated number of days (1, 2, 3, 4, 5, 6, or 8). FIG. 85G is a bar graph showing the level of secreted IL-2 by T cells activated/expanded with the indicated antibody (anti-TCRβV 6-5 v1, anti-TCRβV 6-5 v1. OKT3, or SP34-2) and cultured with said antibody for the indicated number of days (1, 2, 3, 4, 5, 6, or 8).

[0293] FIG. 86A is a bar graph showing the level of secreted IL-17A by T cells activated/expanded with the indicated antibody (anti-TCRβV 6-5 v1, OKT3, or SP34-2) and cultured with said antibody for the indicated number of days (2, 5, or 7). FIG. 86B is a bar graph showing the level of secreted IL-17A by T cells activated/expanded with the indicated antibody (anti-TCRβV 6-5 v1, OKT3, or SP34-2) and cultured with said antibody for the indicated number of days (2, 5, or 8). FIG. 86C is a bar graph showing the level of secreted IL-17A by T cells activated/expanded with the indicated antibody (anti-TCRβV 6-5 v1, OKT3, or SP34-2) and cultured with said antibody for the indicated number of days (2, 5, or 7). FIG. 86D is a bar graph showing the level of secreted IL-17A by T cells activated/expanded with the indicated antibody (anti-TCRβV 6-5 v1 or SP34-2) and cultured with said antibody for the indicated number of days (1, 3, 5, or 7).

[0294] FIG. 87A is a bar graph showing the level of secreted IFNγ by T cells activated/expanded with the indicated antibody (isotype control; anti-TCRβV 6-5 v1 with anti-BCMA antibody; anti-TCRβV 6-5 v1; anti-TCRβV 123/4 v1, or SP34-2) and cultured with said antibody for the indicated number of days (1, 2, 3, 4, 5, 6, or 8). FIG. 87B is a bar graph showing the level of secreted IL-1β by T cells activated/expanded with the indicated antibody (isotype control; anti-TCRβV 6-5 v1 with anti-BCMA antibody; anti-TCRβV 6-5 v1; anti-TCRβV 123/4 v1, or SP34-2) and cultured with said antibody for the indicated number of days (1, 2, 3, 4, 5, 6, or 8). FIG. 87C is a bar graph showing the level of secreted IL-4 by T cells activated/expanded with the indicated antibody (isotype control; anti-TCRβV 6-5 v1 with anti-BCMA antibody; anti-TCRβV 6-5 v1; anti-TCRβV 123/4 v1, or SP34-2) and cultured with said antibody for the indicated number of days (1, 2, 3, 4, 5, 6, or 8). FIG. 87D is a bar graph showing the level of secreted IL-6 by T cells activated/expanded with the indicated antibody (isotype control; anti-TCRβV 6-5 v1 with anti-BCMA antibody; anti-TCRβV 6-5 v1; anti-TCRβV 123/4 v1, or SP34-2) and cultured with said antibody for the indicated number of days (1, 2, 3, 4, 5, 6, or 8). FIG. 87E is a bar graph showing the level of secreted IL-10 by T cells activated/expanded with the indicated antibody (isotype control; anti-TCRβV 6-5 v1 with anti-BCMA antibody; anti-TCRβV 6-5 v1; anti-TCRβV 123/4 v1, or SP34-2) and cultured with said antibody for the indicated number of days (1, 2, 3, 4, 5, 6, or 8). FIG. 87F is a bar graph showing the level of secreted TNFα by T cells activated/expanded with the indicated antibody (isotype control; anti-TCRβV 6-5 v1 with anti-BCMA antibody; anti-TCRβV 6-5 v1; anti-TCRβV 123/4 v1, or SP34-2) and cultured with said antibody for the indicated number of days (1, 2, 3, 4, 5, 6, or 8). FIG. 87G is a bar graph showing the level of secreted IL-2 by T cells activated/expanded with the indicated antibody (isotype control; anti-TCRβV 6-5 v1 with anti-BCMA antibody; anti-TCRβV 6-5 v1; anti-TCRβV 123/4 v1, or SP34-2) and cultured with said antibody for the indicated number of days (1, 2, 3, 4, 5, 6, or 8). FIG. 87H is a bar graph showing the level of secreted IL-12p70 by T cells activated/expanded with the indicated antibody (isotype control; anti-TCRβV 6-5 v1 with anti-BCMA antibody; anti-TCRβV 6-5 v1; anti-TCRβV 123/4 v1, or SP34-2) and cultured with said antibody for the indicated number of days (1, 2, 3, 4, 5, 6, or 8). FIG. 87I is a bar graph showing the level of secreted IL-13 by T cells activated/expanded with the indicated antibody (isotype control; anti-TCRβV 6-5 v1 with anti-BCMA antibody; anti-TCRβV 6-5 v1; anti-TCRβV 123/4 v1, or SP34-2) and cultured with said antibody for the indicated number of days (1, 2, 3, 4, 5, 6, or 8). FIG. 87J is a bar graph showing the level of secreted IL-8 by T cells activated/expanded with the indicated antibody (isotype control; anti-TCRβV 6-5 v1 with anti-BCMA antibody; anti-TCRβV 6-5 v1; anti-TCRβV 123/4 v1, or SP34-2) and cultured with said antibody for the indicated number of days (1, 2, 3, 4, 5, 6, or 8). FIG. 87K is a bar graph showing the level of secreted exotoxin by T cells activated/expanded with the indicated antibody (isotype control; anti-TCRβV 6-5 v1 with anti-BCMA antibody; anti-TCRβV 6-5 v1; anti-TCRβV 123/4 v1, or SP34-2) and cultured with said antibody for the indicated number of days (1, 2, 3, 4, 5, 6, or 8). FIG. 87L is a bar graph showing the level of secreted exotoxin-3 by T cells activated/expanded with the indicated antibody (isotype control; anti-TCRβV 6-5 v1 with anti-BCMA antibody; anti-TCRβV 6-5 v1; anti-TCRβV 123/4 v1, or SP34-2) and cultured with said antibody for the indicated number of days (1, 2, 3, 4, 5, 6, or 8). FIG. 87M is a bar graph showing the level of secreted IL-8 by T cells activated/expanded with the indicated antibody (isotype control; anti-TCRβV 6-5 v1 with anti-BCMA antibody; anti-TCRβV 6-5 v1; anti-TCRβV 123/4 v1, or SP34-2) and cultured with said antibody for the indicated number of days (1, 2, 3, 4, 5, 6, or 8). FIG. 87N is a bar graph showing the level of secreted IP-10 by T cells activated/expanded with the indicated antibody (isotype control; anti-TCRβV 6-5 v1 with anti-BCMA antibody; anti-TCRβV 6-5 v1; anti-TCRβV 123/4 v1, or SP34-2) and cultured with said antibody for the indicated number of days (1, 2, 3, 4, 5, 6, or 8). FIG. 87O is a bar graph showing the level of secreted MCP-1 by T cells activated/expanded with the indicated antibody (isotype control; anti-TCRβV 6-5 v1 with anti-BCMA antibody; anti-TCRβV 6-5 v1; anti-TCRβV 123/4 v1, or SP34-2) and cultured with said antibody for the indicated number of days (1, 2, 3, 4, 5, 6, or 8). FIG. 87P is a bar graph showing the level of secreted MCP-4 by T cells activated/expanded with the indicated antibody (isotype control; anti-TCRβV 6-5 v1 with anti-BCMA antibody; anti-TCRβV 6-5 v1; anti-TCRβV 123/4 v1, or SP34-2) and cultured with said antibody for the indicated number of days (1, 2, 3, 4, 5, 6, or 8). FIG. 87Q is a bar graph showing the level of secreted MDC by T cells activated/expanded with the indicated antibody (isotype control; anti-TCRβV 6-5 v1 with anti-BCMA antibody; anti-TCRβV 6-5 v1; anti-TCRβV 123/4 v1, or SP34-2) and cultured with said antibody for the indicated number of days (1, 2, 3, 4, 5, 6, or 8). FIG. 87R is a bar graph showing the level of secreted MIP-1a by T cells activated/expanded with the indicated antibody (isotype control; anti-TCRβV 6-5 v1 with anti-BCMA antibody; anti-TCRβV 6-5 v1; anti-TCRβV 123/4 v1, or SP34-2) and cultured with said antibody for the indicated number of days (1, 2, 3, 4, 5, 6, or 8). FIG. 87S is a bar graph showing the level of secreted MIP-1b by T cells activated/expanded with the indicated antibody (isotype control; anti-TCRβV 6-5 v1 with anti-BCMA antibody; anti-TCRβV 6-5 v1; anti-TCRβV 123/4 v1, or SP34-2) and cultured with said antibody for the indicated number of days (1, 2, 3, 4, 5, 6, or 8). FIG. 87T is a bar graph showing the level of secreted TARC by T cells activated/expanded with the indicated antibody (isotype control; anti-TCRβV 6-5 v1 with anti-BCMA antibody; anti-TCRβV 6-5 v1; anti-TCRβV 123/4 v1, or SP34-2) and cultured with said antibody for the indicated number of days (1, 2, 3, 4, 5, 6, or 8). FIG. 87U is a bar graph showing the level of secreted GMCSF by T cells activated/expanded with the indicated antibody (isotype control; anti-TCRβV 6-5 v1 with anti-BCMA antibody; anti-TCRβV 6-5 v1; anti-TCRβV 123/4 v1, or SP34-2) and cultured with said antibody for the indicated number of days (1, 2, 3, 4, 5, 6, or 8). FIG. 87V is a bar graph showing the level of secreted IL-12-23p40 by T cells activated/expanded with the indicated antibody (isotype control; anti-TCRβV 6-5 v1 with anti-BCMA antibody; anti-TCRβV 6-5 v1; anti-TCRβV 123/4 v1, or SP34-2) and cultured with said antibody for the indicated number of days (1, 2, 3, 4, 5, 6, or 8). FIG. 87W is a bar graph showing the level of secreted IL-15 by T cells activated/expanded with the indicated antibody (isotype control; anti-TCRβV 6-5 v1 with anti-BCMA antibody; anti-TCRβV 6-5 v1; anti-TCRβV 123/4 v1, or SP34-2) and cultured with said antibody for the indicated number of days (1, 2, 3, 4, 5, 6, or 8). FIG. 87X is a bar graph showing the level of secreted IL-16 by T cells activated/expanded with the indicated antibody (isotype control; anti-TCRβV 6-5 v1 with anti-BCMA antibody; anti-TCRβV 6-5 v1; anti-TCRβV 123/4 v1, or SP34-2) and cultured with said antibody for the indicated number of days (1, 2, 3, 4, 5, 6, or 8). FIG. 87Y is a bar graph showing the level of secreted IL-17a by T cells activated/expanded with the indicated antibody (isotype control; anti-TCRβV 6-5 v1 with anti-BCMA antibody; anti-TCRβV 6-5 v1; anti-TCRβV 123/4 v1, or SP34-2) and cultured with said antibody for the indicated number of days (1, 2, 3, 4, 5, 6, or 8). FIG. 87Z is a bar graph showing the level of secreted IL-1a by T cells activated/expanded with the indicated antibody (isotype control; anti-TCRβV 6-5 v1 with anti-BCMA antibody; anti-TCRβV 6-5 v1; anti-TCRβV 123/4 v1, or SP34-2) and cultured with said antibody for the indicated number of days (1, 2, 3, 4, 5, 6, or 8). FIG. 87AA is a bar graph showing the level of secreted IL-5 by T cells activated/expanded with the indicated antibody (isotype control; anti-TCRβV 6-5 v1 with anti-BCMA antibody; anti-TCRβV 6-5 v1; anti-TCRβV 123/4 v1, or SP34-2) and cultured with said antibody for the indicated number of days (1, 2, 3, 4, 5, 6, or 8). FIG. 87BB is a bar graph showing the level of secreted IL-7 by T cells activated/expanded with the indicated antibody (isotype control; anti-TCRβV 6-5 v1 with anti-BCMA antibody; anti-TCRβV 6-5 v1; anti-TCRβV 123/4 v1, or SP34-2) and cultured with said antibody for the indicated number of days (1, 2, 3, 4, 5, 6, or 8). FIG. 87CC is a bar graph showing the level of secreted TNF-β by T cells activated/expanded with the indicated antibody (isotype control; anti-TCRβV 6-5 v1 with anti-BCMA antibody; anti-TCRβV 6-5 v1; anti-TCRβV 123/4 v1, or SP34-2) and cultured with said antibody for the indicated number of days (1, 2, 3, 4, 5, 6, or 8). FIG. 87DD is a bar graph showing the level of secreted VEGF by T cells activated/expanded with the indicated antibody (isotype control; anti-TCRβV 6-5 v1 with anti-BCMA antibody; anti-TCRβV 6-5 v1; anti-TCRβV 123/4 v1, or SP34-2) and cultured with said antibody for the indicated number of days (1, 2, 3, 4, 5, 6, or 8).

[0295] FIG. 88 shows a graphical representation of the relation of sequences between different TCRVB clonotype subfamilies.

[0296] FIG. 89A is a bar graph showing the percentage of cytokine release from PBMCs activated/expanded for eight days using the indicated antibody (anti-TCRβV 12-3/4 vi or SP34-2). FIG. 89B is a bar graph showing the percentage of cytokine release from PBMCs activated/expanded for eight days using the indicated antibody (anti-TCRβV 5 or SP34-2). FIG. 89C is a bar graph showing the percentage of cytokine release from PBMCs activated/expanded for eight days using the indicated antibody (anti-TCRβV 10 or SP34-2).

[0297] FIG. 90A a bar graph showing the level of secreted IFNγ by T cells activated/expanded with the indicated antibody for the indicated number of days (3 or 6). FIG. 90B a bar graph showing the level of secreted IL-10 by T cells activated/expanded with the indicated antibody for the indicated number of days (3 or 6). FIG. 90C a bar graph showing the level of secreted IL-17A by T cells activated/expanded with the indicated antibody for the indicated number of days (3 or 6). FIG. 90D a bar graph showing the level of secreted IL-1a by T cells activated/expanded with the indicated antibody for the indicated number of days (3 or 6). FIG. 90E a bar graph showing the level of secreted IL-1β by T cells activated/expanded with the indicated antibody for the indicated number of days (3 or 6). FIG. 90F a bar graph showing the level of secreted IL-6 by T cells activated/expanded with the indicated antibody for the indicated number of days (3 or 6). FIG. 90G a bar graph showing the level of secreted TNFα by T cells activated/expanded with the indicated antibody for the indicated number of days (3 or 6). FIG. 90H a bar graph showing the level of secreted IL-2 by T cells activated/expanded with the indicated antibody for the indicated number of days (3 or 6).

[0298] FIG. 91 is a bar graph summarizing data from FACS analysis of PBMCs activated/expanded for 6 days using the indicated anti-TCRVβ antibody.

[0299] FIG. 92A a bar graph showing the level of secreted IFNγ by T cells activated/expanded with the indicated antibody for the indicated number of days (1, 3, 5, or 7). FIG. 92B a bar graph showing the level of secreted IL-10 by T cells activated/expanded with the indicated antibody for the indicated number of days (1, 3, 5, or 7). FIG. 92C a bar graph showing the level of secreted IL-17A by T cells activated/expanded with the indicated antibody for the indicated number of days (1, 3, 5, or 7). FIG. 92D a bar graph showing the level of secreted IL-1a by T cells activated/expanded with the indicated antibody for the indicated number of days (1, 3, 5, or 7). FIG. 92E a bar graph showing the level of secreted IL-1β by T cells activated/expanded with the indicated antibody for the indicated number of days (1, 3, 5, or 7). FIG. 92F a bar graph showing the level of secreted IL-6 by T cells activated/expanded with the indicated antibody for the indicated number of days (1, 3, 5, or 7). FIG. 92G a bar graph showing the level of secreted IL-4 by T cells activated/expanded with the indicated antibody for the indicated number of days (1, 3, 5, or 7). FIG. 92H a bar graph showing the level of secreted IL-2 by T cells activated/expanded with the indicated antibody for the indicated number of days (1, 3, 5, or 7).

[0300] FIG. 93 is a bar graph summarizing data from FACS analysis of PBMCs activated/expanded for 7 days using the indicated anti-TCRVβ antibody.

[0301] FIG. 94A is a bar graph showing the level of secreted IFNγ by T cells activated/expanded with the indicated antibody for the indicated number of days (3 or 6). FIG. 94B a bar graph showing the level of secreted IL-10 by T cells activated/expanded with the indicated antibody for the indicated number of days (3 or 6). FIG. 94C a bar graph showing the level of secreted IL-17A by T cells activated/expanded with the indicated antibody for the indicated number of days (3 or 6). FIG. 94D a bar graph showing the level of secreted IL-1a by T cells activated/expanded with the indicated antibody for the indicated number of days (3 or 6). FIG. 94E a bar graph showing the level of secreted IL-1β by T cells activated/expanded with the indicated antibody for the indicated number of days (3 or 6). FIG. 94F a bar graph showing the level of secreted IL-6 by T cells activated/expanded with the indicated antibody for the indicated number of days (3 or 6). FIG. 94G a bar graph showing the level of secreted IL-4 by T cells activated/expanded with the indicated antibody for the indicated number of days (3 or 6). FIG. 94H a bar graph showing the level of secreted TNFα, by T cells activated/expanded with the indicated antibody for the indicated number of days (3 or 6). FIG. 94I a bar graph showing the level of secreted IL-2 by T cells activated/expanded with the indicated antibody for the indicated number of days (3 or 6).

[0302] FIG. 95A is a bar graph showing the level of secreted IFN-γ by T cells activated/expanded with the indicated antibody (anti-TCRβV 6-5 v1 (plate coated), anti-CD3s (plate coated), anti-TCRβV 6-5 v1 (in solution), or anti-CD3ε (in solution) and cultured with said antibody for the indicated number of days (1, 3, 5, or 7). FIG. 95B is a bar graph showing the level of secreted IFN-γ by T cells activated/expanded with the indicated antibody (anti-TCRβV 6-5 v1 (plate coated), anti-CD3ε (plate coated), anti-TCRβV 6-5 v1 (in solution), or anti-CD3ε (in solution) and cultured with said antibody for the indicated number of days (1, 3, 5, or 7). FIG. 95C is a bar graph showing the level of secreted IL-1b by T cells activated/expanded with the indicated antibody (anti-TCRβV 6-5 v1 (plate coated), anti-CD3ε (plate coated), anti-TCRβV 6-5 v1 (in solution), or anti-CD3ε (in solution) and cultured with said antibody for the indicated number of days (1, 3, 5, or 7). FIG. 95D is a bar graph showing the level of secreted IL-6 by T cells activated/expanded with the indicated antibody (anti-TCRβV 6-5 v1 (plate coated), anti-CD3ε (plate coated), anti-TCRβV 6-5 v1 (in solution), or anti-CD3ε (in solution) and cultured with said antibody for the indicated number of days (1, 3, 5, or 7). FIG. 95E is a bar graph showing the level of secreted IL-10 by T cells activated/expanded with the indicated antibody (anti-TCRβV 6-5 v1 (plate coated), anti-CD3ε (plate coated), anti-TCRβV 6-5 v1 (in solution), or anti-CD3ε (in solution) and cultured with said antibody for the indicated number of days (1, 3, 5, or 7). FIG. 95F is a bar graph showing the level of secreted IL-15 by T cells activated/expanded with the indicated antibody (anti-TCRβV 6-5 v1 (plate coated), anti-CD3ε (plate coated), anti-TCRβV 6-5 v1 (in solution), or anti-CD3ε (in solution) and cultured with said antibody for the indicated number of days (1, 3, 5, or 7). FIG. 95G is a bar graph showing the level of secreted IL-17A by T cells activated/expanded with the indicated antibody (anti-TCRβV 6-5 v1 (plate coated), anti-CD3ε (plate coated), anti-TCRβV 6-5 v1 (in solution), or anti-CD3ε (in solution) and cultured with said antibody for the indicated number of days (1, 3, 5, or 7). FIG. 95H is a bar graph showing the level of secreted IL-1a by T cells activated/expanded with the indicated antibody (anti-TCRβV 6-5 v1 (plate coated), anti-CD3ε (plate coated), anti-TCRβV 6-5 v1 (in solution), or anti-CD3ε (in solution) and cultured with said antibody for the indicated number of days (1, 3, 5, or 7). FIG. 95I is a bar graph showing the level of secreted IL-1b by T cells activated/expanded with the indicated antibody (anti-TCRβV 6-5 v1 (plate coated), anti-CD3ε (plate coated), anti-TCRβV 6-5 v1 (in solution), or anti-CD3ε (in solution) and cultured with said antibody for the indicated number of days (1, 3, 5, or 7). FIG. 95J is a bar graph showing the level of secreted IL-2 by T cells activated/expanded with the indicated antibody (anti-TCRβV 6-5 v1 (plate coated), anti-CD3ε (plate coated), anti-TCRβV 6-5 v1 (in solution), or anti-CD3ε (in solution) and cultured with said antibody for the indicated number of days (1, 3, 5, or 7). FIG. 95K is a bar graph showing the level of secreted IL-4 by T cells activated/expanded with the indicated antibody (anti-TCRβV 6-5 v1 (plate coated), anti-CD3ε (plate coated), anti-TCRβV 6-5 v1 (in solution), or anti-CD3ε (in solution) and cultured with said antibody for the indicated number of days (1, 3, 5, or 7). FIG. 95L is a bar graph showing the level of secreted TNF-α by T cells activated/expanded with the indicated antibody (anti-TCRβV 6-5 v1 (plate coated), anti-CD3ε (plate coated), anti-TCRβV 6-5 v1 (in solution), or anti-CD3ε (in solution) and cultured with said antibody for the indicated number of days (1, 3, 5, or 7).

[0303] FIG. 96 is a FACS plot showing the showing the ability of MH3-2 to bind PBMCs from one of two donors when the PBMCs are either preincubated with TM23 or not (MH3-2 Alone).

[0304] FIG. 97 is a FACS plot showing the ability of MH3-2 to bind PBMCs from one of two donors when the PBMCs are either preincubated with TM23 or not (MH3-2 Alone).

[0305] FIG. 98A is a bar graph showing the polyfunctional strength index (PSI) of PBMC CD4+ T cells. CD4+ T cells expanded with anti-CD3 antibody, (CD3 Expanded T cells), and CD4+ T cells expanded with anti-TCRVβ 6-5 antibody (Drug Expanded T cells). The Effector mediators are Granzyme B, IFNγ, MIP-1α, perforin, TNFα, and TNFβ. The Stimulatory mediators are IL-5. The Chemoattractive mediators are MIP-1b. FIG. 98B is a bar graph showing the polyfunctional strength index (PSI) of PBMC CD8+ T cells, CD8+ T cells expanded with anti-CD3 antibody, (CD3 Expanded T cells), and CD8+ T cells expanded with anti-TCRVβ 6-5 antibody (Drug Expanded T cells) The Effector mediators are Granzyme B, IFNγ, MIP-1α, perforin, and TNFβ. The Chemoattractive mediators are MIP-1b and RANTES.

[0306] FIG. 99 is a schematic of the experimental design for the pharmacokinetic (PK) profile and dosing strategy of the multifunctional polypeptide molecule as described herein.

[0307] FIG. 100 shows Table 9, which depicts alignment of TCRβV amino acid sequences (SEQ ID NOS 3457-3516, 3669-3673, 3522, 3674-3675, 3525, 3676-3687, 3538, 3688-3698 and 3550-3639, respectively, in order of appearance). The alignment of TCRβV amino acid sequences in Table 9 underscores the diversity of TCR sequences. In particular, the TRBV sequences from different subfamilies are considerably different from each other.

[0308] FIG. 101 shows alignment of affinity matured humanized Antibody A-H VL sequences (SEQ ID NOS: 3377-3389, respectively, in order of appearance).

[0309] FIG. 102 shows alignment of affinity matured humanized Antibody A-H VH sequences (SEQ ID NOS: 3390-3436, respectively, in order of appearance).

[0310] FIG. 103A shows an exemplary embodiment (e.g., BKM0186) of multifunctional molecules comprising a TCRβV-binding moiety and a cytokine polypeptide (e.g., IL2 or IL2-C125A) as described herein. FIG. 103B shows an exemplary embodiment of multifunctional molecules comprising a TCRβV-binding moiety and a cytokine polypeptide as described herein. FIGS. 103C, 103D, 103E, and 103F show exemplary embodiments of multifunctional molecules comprising a first TCRβV-binding moiety, a second TCRβV-binding moiety, and two cytokine polypeptides as described herein. In some embodiments, the cytokine polypeptide comprises IL-2 or a functional fragment or a functional variant thereof, IL2-C125A or a functional fragment or a functional variant thereof, IL-15 or a functional fragment or a functional variant thereof, IL-7 or a functional fragment or a functional variant thereof, IL-12 or a functional fragment or a functional variant thereof, or IL-21 or a functional fragment or a functional variant thereof. In embodiments, the cytokine polypeptide further comprises a cytokine receptor. In some embodiments, the cytokine polypeptide comprises IL-15 linked to a IL-15Ra. In some embodiments, the cytokine polypeptide comprises IL-15 linked to a IL-15Ra sushi domain. In some embodiments, the cytokine polypeptide comprises a cytokine dimer. In some embodiments, the cytokine polypeptide comprises an IL-12 beta subunit linked to an IL-12 alpha subunit.

[0311] FIG. 104 shows FACS plots showing binding of BKM0186 to different immune cell populations in Human PBMCs.

[0312] FIG. 105 shows binding of BKM0186 to pure human T cells expressing either Vβ6 or CD25 (IL-2Rα) or both.

[0313] FIG. 106 shows in vitro concentration-effect relationships for BKM0186-mediated in vitro expansion of Vβ6 T cells and activated (CD25) Vβ6 T cells from human PBMCs at day 5 as a % of total T-Cytotoxic (CD8) and T-helper (CD4) populations. Left graph: T-cytotoxic lymphocytes: right graph: T-helper lymphocytes.

[0314] FIG. 107 shows in vitro TCR sequencing. PBMCs were incubated with 100 nM of BKM0186 for 5 days and T cells were sequenced for TCR β chain V (TRBV) genes. Compared to unstimulated T cells (grey), BKM0186 selectively expanded T cells bearing TRBV6-1, TRBV6-2, TRBV6-3, TRBV6-5, and TRBV10-3.

[0315] FIG. 108A and FIG. 108B show a series of graphs (FIG. 108A) and a series of FACS plots (FIG. 108B) exhibiting activation of CD4+ and CD8+ T cells as assessed by CD25 expression following stimulation with BKM0186. RSV-IL2 and Anti-TCRVβ6 control in solution.

[0316] FIG. 109 shows a series of FACS plots demonstrating differentiation of memory T cells mediated by BKM0186 in comparison to unstimulated and the controls RSV-IL2 and anti-TCRVβ6. Upper left quadrant represents Central memory (CM), lower left quadrant represents Effector memory (EM), upper right quadrant represents Naïve (N) and lower right quadrant represents Effector memory RA (TEMRA).

[0317] FIG. 110 shows in vitro concentration-effect relationships for BKM0186-induced cytokine release from human PBMCs at day 4 using MSD V-plex human cytokine panel.

[0318] FIG. 111 shows BKM0186-mediated killing of human tumor organoids generated from primary, patient-derived tissue from colorectal and NSCLC cancer patients. Vertical bars represent percentage of organoid area reduced relative to isotype control following incubation of organoids with BKM0186 and autologous TILs.

[0319] FIG. 112 shows tumor growth curves of mBKM0186-treated EMT6 tumor-bearing mice. Studies were performed in randomized mice with tumor volumes of 80-150 mm³. For all models except MC38, mice were dosed for 3 weeks with a weekly dosing of 0.5-1.5 mg/kg and survival was determined based on 2000 mm³ tumor volume end point.

[0320] FIG. 113 shows tumor growth curves of mBKM0186-treated mice. Studies were performed in randomized mice with tumor volumes of 80-150 mm³. For all models except MC38, mice were dosed for 4 weeks with a weekly dosing of 1-1.5 mg/kg and survival was determined based on 2000 mm³ tumor volume end point. For MC38, mice were given first dose of 3 mg/kg followed by 1 mg/kg for subsequent three weekly (QW) doses.

[0321] FIG. 114 shows Kaplan-Meier survival curves of treated mice. Studies were performed in randomized mice with tumor volumes of 80-150 mm³. For all models except MC38, mice were dosed for 4 weeks with a weekly dosing of 1-1.5 mg/kg and survival was determined based on 2000 mm³ tumor volume end point. For MC38, mice were given first dose of 3 mg/kg followed by 1 mg/kg for subsequent three weekly (QW) doses.

[0322] FIG. 115 shows the experimental design for the tumor rechallenge study. Cured EMT6 tumor bearing mice were rechallenged with EMT6 tumor cells in one flank and CT26 tumor cells in another flank and monitored for tumor growth for 28 days.

[0323] FIG. 116 shows the results of the tumor rechallenge study. While the EMT6 tumors were rejected. CT26 tumors grew, suggesting that the memory response against EMT6 tumors likely mediated through mBKM0186 treatment has been established.

[0324] FIG. 117 shows immune profiling of T cells in blood and tumor tissue on day 14 post dosing of mBKM0186.

[0325] FIG. 118 shows tumor growth curves of EMT6 tumors after weekly (QW) treatment of mice bearing 150 mm³ tumors with 1 mg/kg of mBKM0186 with and without depletion of Vβ-specific T cells Filled Triangles indicate dosing intervals of the depleting antibodies and open Triangles indicate dosing intervals of mBKM0186.

[0326] FIG. 119A and FIG. 119B show Pharmacokinetic profiles of BKM0186 (FIG. 119A) and BKM0281 (FIG. 119B) administered single dose IV in cynomolgus monkeys.

[0327] FIG. 120A shows T cell expansion following a single IV dose of BKM0186. FIG. 120B shows T cell expansion following a single IV dose BKM0281. n=3 Monkeys, n=1 monkey vehicle control.

[0328] FIG. 121 shows serum soluble CD25 levels in monkeys administered a single IV dose of BKM0186. Mean values, n=2-3 monkeys per group.

[0329] FIG. 122A shows serum IL-6 levels in monkeys administered a single IV dose of BKM0186. FIG. 122B shows serum IL-6 levels in monkeys administered a single IV dose of BKM0281. Mean values, n=2-3 monkeys per group.

[0330] FIG. 123A shows serum IFN-γ levels in monkeys administered a single IV dose of BKM0186. FIG. 123B shows IFN-γ levels in monkeys administered a single IV dose of BKM0281. Mean values, n=2-3 monkeys per group. Mean values, n=2-3 monkeys per group.

[0331] FIG. 124 shows in vitro concentration-effect relationships for bispecific-mediated in vitro expansion of Vβ6 T cells.

[0332] FIGS. 125A and 125B show exemplary embodiments of multifunctional molecules comprising a TCRβV-binding moiety and a cytokine molecule (e.g., wild-type human IL2 or IL 15-IL 15R sushi fusion) as described herein. FIGS. 125C-125T show exemplary embodiments of multifunctional molecules, e.g., multifunctional molecules comprising a tumor-associated antigen (TAA) binding moiety, a TCRβV-binding moiety, and at least one cytokine molecule or a functional fragment or functional variant thereof as described herein. In some embodiments, a tumor-associated antigen (TAA)-binding moiety and/or a TCRβV-binding moiety are antibody, an antigen binding fragment thereof or an antibody fragment. In some embodiments, an antigen binding fragment or an antibody fragment comprises Fab. Fab′, F(ab′)₂, F(ab)₂, variable fragment (Fv), domain antibody (dAb), or single chain variable fragment (scFv). In some embodiments, the at least one cytokine molecule or a functional fragment or functional variant thereof is selected from the group consisting of interleukin-2 (IL-2) or a functional fragment or functional variant thereof, interleukin-7 (IL-7) or a functional fragment or functional variant thereof, interleukin-12 (IL-12) or a functional fragment or functional variant thereof, interleukin-15 (IL-15) or a functional fragment or functional variant thereof, interleukin-18 (IL-18) or a functional fragment or functional variant thereof, interleukin-21 (IL-21) or a functional fragment or functional variant thereof, or interferon gamma or a functional fragment or functional variant thereof, or a combination thereof. In some embodiments, exemplary embodiments of multifunctional molecules, e.g., multifunctional molecules comprising a tumor-associated antigen (TAA)-binding moiety, a TCRβV-binding moiety, and at least one cytokine molecule or a functional fragment or functional variant thereof as described herein comprises a dimerization module comprising an Fc region comprising N297A mutation. FIGS. 125C-125H show exemplary embodiments of multifunctional molecules, e.g., multifunctional molecules comprising a tumor-associated antigen (TAA)-binding moiety, a TCRβV-binding moiety, and at least one cytokine molecule or a functional fragment or functional variant thereof as described herein, wherein the multifunctional molecules comprise an exemplary dimerization module, e.g., an Fc region comprising Knob-in-hole mutations and disulfide bridges. FIGS. 1251-125N show exemplary embodiments of multifunctional molecules, e.g., multifunctional molecules comprising a tumor-associated antigen (TAA)-binding moiety, a TCRβV-binding moiety, and at least one cytokine molecule or a functional fragment or functional variant thereof as described herein, wherein the multifunctional molecules comprise an exemplary dimerization module, e.g., an Fc region comprising disulfide bridges, but not comprising Knob-in-hole mutations. FIGS. 1250-125T show exemplary embodiments of multifunctional molecules, e.g., multifunctional molecules comprising a tumor-associated antigen (TAA)-binding moiety, a TCRβV-binding moiety, and at least one cytokine molecule or a functional fragment or functional variant thereof as described herein, wherein the multifunctional molecules comprise an exemplary dimerization module, e.g., an Fc region not comprising disulfide bridges nor Knob-in-hole mutations. FIGS. 125C-125E, 125I-125K, and 1250-135Q show exemplary embodiments of multifunctional molecules, e.g., multifunctional molecules comprising a tumor-associated antigen (TAA)-binding moiety, a TCRβV-binding moiety, and at least one cytokine molecule or a functional fragment or functional variant thereof as described herein, wherein the TCRβV-binding moiety comprises an scFv. FIGS. 125F-125H, 125L-125N, and 125R-135T show exemplary embodiments of multifunctional molecules, e.g., multifunctional molecules comprising a tumor-associated antigen (TAA)-binding moiety, a TCRβV-binding moiety, and at least one cytokine molecule or a functional fragment or functional variant thereof as described herein, wherein the TCRβV-binding moiety comprises an Fab. FIG. 125U shows an exemplary embodiment of multifunctional molecules, e.g., multifunctional molecules comprising a tumor-associated antigen (TAA)-binding moiety, a TCRβV-binding moiety, and at least one cytokine molecule or a functional fragment or functional variant thereof as described herein, wherein the multifunctional molecule comprise two TAA-binding moieties. In some embodiments, the at least one cytokine molecule or a functional fragment or functional variant thereof is interleukin-7 (IL-7) or a functional fragment or functional variant thereof, interleukin-12 (IL-12) or a functional fragment or functional variant thereof, interleukin-15 (IL-15) or a functional fragment or functional variant thereof, interleukin-18 (IL-18) or a functional fragment or functional variant thereof, interleukin-21 (IL-21) or a functional fragment or functional variant thereof, or interferon gamma or a functional fragment or functional variant thereof, or a combination thereof instead of interleukin-2 (IL-2) or a functional fragment or functional variant thereof as indicated as “IL2”.

[0333] FIGS. 126A, 126B and 126C show that anti-CD20 TriSTAR molecules, which are exemplary embodiments of the multifunctional molecule as provided herein, induce highly potent Vβ-specific expansion, CD8+ T cell activation and killing of B cells in vitro. FIG. 126A depicts in vitro murine Vβ T cell expansion, FIG. 126B depicts in vitro murine CD8+ T cell activation and expansion, and FIG. 126C depicts in vitro murine B cell depletion.

[0334] FIG. 127 shows that anti-CD20 TriSTAR T-cell engagers (TCEs), which are exemplary embodiments of the multifunctional molecule as provided herein, also show potent B cell-depletion in vivo upon single IP dose of 3 mg/kg. In the same study anti-CD3/CD20 bispecific was also tested and showed to have comparable potency in vivo.

[0335] FIGS. 128A and 128B show in vitro expansion with anti-MSLN TriSTAR (BLM0155), which is an exemplary embodiment of the multifunctional molecule as provided herein, and CD3 TCE (BMM0388). Both TriSTAR and CD3 engagers expanded in the presence of plate-bound MSLN. FIG. 128A depicts % CD25⁺, and FIG. 128B depicts EC50 and Emax (%).

[0336] FIGS. 129A and 129B show in vitro expansion with anti-MSLN Vb bispecific TCEs (BLM0158, 1×1 format: BMM0274, 2×2 format), which are exemplary embodiments of the multifunctional molecule as provided herein, and CD3 TCE. Both Vb and CD3 engagers expanded in the presence of plate-bound MSLN. CD3 TCE expanded much more. FIG. 129A depicts % CD25⁺, and FIG. 129B depicts EC50 and Emax (%).

[0337] FIGS. 130A and 130B show in vitro cytotoxicity with anti-MSLN TriSTARs (BLM0155, 1×1×1 TriSTAR: BMM0462, 2×1×1 TriSTAR format), which are exemplary embodiments of the multifunctional molecule as provided herein, and CD3 TCE (BMM0388). FIG. 130A depicts % cytotoxicity, and FIG. 130B depicts EC50 and Emax (%).

[0338] FIGS. 131A and 131B show in vitro cytotoxicity with anti-MSLN Vb bispecific TCEs (BLM0158, 1×1 format: BMM0274, 2×2 format), which are exemplary embodiments of the multifunctional molecule as provided herein, and CD3 TCE. FIG. 131A depicts % cytotoxicity, and FIG. 131B depicts EC50 and Emax (%).

[0339] FIGS. 132A and 132B show in vitro expansion with anti-MSLN TriSTAR murine surrogates (BMM0449, 1×1×1 TriSTAR format: BMM0456, 2×1×1 TriSTAR format), which are exemplary embodiments of the multifunctional molecule as provided herein, and CD3 TCE (BMM0456, 1×1 CD3 TCE; BMM0469, 2×1 CD3 TCE). All the TCE constructs showed potent expansion in the presence of the plate-bound MSLN. FIG. 132A depicts % CD25′, and FIG. 132B depicts EC50 and Emax (%).

[0340] FIGS. 133A-133D show in vitro expansion with anti-MSLN Vb TCE murine surrogates (BMM0446, 1×1 format: BMM0439, 2×2 format), which is an exemplary embodiment of the multifunctional molecule as provided herein, and CD3 TCE (BMM0456). All the constructs demonstrated expansion in the presence of plate-bund MSLN. FIGS. 133A and 133C depict % CD25⁺, and FIGS. 133B and 133D depict EC50 and Emax (%).

[0341] FIG. 134 shows in vitro cytotoxicity of EMT6 cells with anti-MSLN TriSTAR murine surrogate (BMM0449) and CD3 TCE (BMM0456).

[0342] FIGS. 135A and 135B show in vitro cytotoxicity of EMT6 cells anti-MSLN Vb TCE murine surrogates (BMM0446, 1×1 format: BMM0439, 2×2 format), which are exemplary embodiments of the multifunctional molecule as provided herein, and CD3 TCE FIG. 135A depicts % cytotoxicity, and FIG. 135B depicts EC50 and Emax (%).

[0343] FIGS. 136A and 136B show that anti-MSLN TriSTAR murine surrogate (BMM0449), which are exemplary embodiments of the multifunctional molecule as provided herein, show potent anti-tumor activity vs, αCD3 TCE (BMM0456) in EMT6 syngeneic mouse model. Tumor bearing mice received weekly doses of 3 mg/kg of the test articles for 4 weeks. FIG. 136A depicts a scheme of the experimental design, and FIG. 136B depicts mean tumor volume.

[0344] FIG. 137 shows PK data for anti-MSLN TriSTAR murine surrogate (BMM0449), which is an exemplary embodiments of the multifunctional molecule as provided herein.

[0345] FIG. 138 shows that anti-gp75 Vβ bispecific TCEs murine surrogates (BNM0104, 1×1 format and BNM0869, 2×2 format), which are exemplary embodiments of the multifunctional molecule as provided herein, showed limited activity in solid (B16F10) syngeneic tumors. Limited anti-tumor activity of 1×1 and 2×2 Vβ×gp75 TCEs, which are exemplary embodiments of the multifunctional molecule as provided herein, in B16F10 solid tumor model.

[0346] FIG. 139 shows that when combined with an exemplary multifunctional molecule comprising a anti-Vβ binder and IL-2 (BKM0307), anti-gp75 Vβ murine surrogate TCEs (BNM0104, 1×1 format and BNM0869, 2×2 format), which are exemplary embodiments of the multifunctional molecule as provided herein, are highly active. 1×1 and 2×2 Vβ×gp75 T cell engagers are active in B16F10 tumor model when dosed with or following an exemplary multifunctional molecule comprising a anti-Vβ binder and IL-2.

[0347] FIG. 140 shows that anti-gp75 TriSTAR TCE murine surrogate (BNM0094), which is an exemplary embodiments of the multifunctional molecule as provided herein, promotes superior anti-tumor activity vs. anti-gp75/αCD3 TCEs (BNM0092) in B16F10 model. Significant anti-tumor activity in refractory B16 mouse with TriSTAR TCE was observed.

[0348] FIGS. 141A-141C show pharmacokinetics of TriSTAR construct (BNM0094), which is an exemplary embodiments of the multifunctional molecule as provided herein. FIG. 141A depicts the results of an exemplary embodiments of the multifunctional molecule as provided herein, BNM0094, and FIG. 141B depicts the results of a CD3×gp75 bispecific molecule, BNM0092. FIG. 141C depicts the experimental design.

[0349] FIGS. 142A-142C show that in B16F10 tumors. TriSTAR, which is an exemplary embodiments of the multifunctional molecule as provided herein, promotes greater expansion of cytotoxic CD8 T cells in the tumor microenvironment. FIG. 142A depicts % CD8 of CD45 cells, FIG. 142B depicts % CD& CD25 cells, and FIG. 142C depicts % CD8 granzyme B cells.

[0350] FIGS. 143A and 143B show Vβ13+ T cell expansion by Tri-STAR, which is an exemplary embodiments of the multifunctional molecule as provided herein, in tumor microenvironment (TME). FIG. 143A depicts CD8 Vb cells/mg tumor, and FIG. 143B depicts % CD8 Vb subset frequency.

### DETAILED DESCRIPTION

### Definition

[0351] Certain specific details of this description are set forth in order to provide a thorough understanding of various embodiments. However, one skilled in the art will understand that the present disclosure may be practiced without these details. In other instances, well-known structures have not been shown or described in detail to avoid unnecessarily obscuring descriptions of the embodiments.

[0352] Unless the context requires otherwise, throughout the specification and claims which follow, the word “comprise” and variations thereof, such as, “comprises” and “comprising” are to be construed in an open, inclusive sense, that is, as “including, but not limited to.” Further, headings provided herein are for convenience only and do not interpret the scope or meaning of the claimed disclosure.

[0353] As used in this specification and the appended claims, the singular forms “a,” “an,” and “the” include plural referents unless the content clearly dictates otherwise. The use of the words “a” or “an” when used in conjunction with the term “comprising” herein may mean “one,” but it is also consistent with the meaning of “one or more,” “at least one,” and “one or more than one.”

[0354] It should also be noted that the term “or” is generally employed in its sense including “and/or” unless the content clearly dictates otherwise.

[0355] Unless otherwise defined, all technical and scientific terms used herein have the same meaning as commonly understood by one of ordinary skill in the art to which this disclosure belongs. Although methods and materials similar or equivalent to those described herein can be used in the practice or testing of the present disclosure, suitable methods and materials are described below.

[0356] The term “about” when referring to a measurable value such as an amount, a temporal duration, and the like, is meant to encompass variations of ±20% or in some instances ±10%, or in some instances ±5%, or in some instances ±1%, or in some instances ±0.1% from the specified value, as such variations are appropriate to perform the disclosed methods. As used herein, “about” and “approximately” generally mean an acceptable degree of error for the quantity measured given the nature or precision of the measurements. Exemplary degrees of error are within 20 percent (%), typically, within 10%, and more typically, within 5% of a given range of values.

[0357] The term “acquire” or “acquiring” as the terms are used herein, refer to obtaining possession of a physical entity (e.g., a sample, a polypeptide, a nucleic acid, or a sequence), or a value, e.g., a numerical value, by “directly acquiring” or “indirectly acquiring” the physical entity or value. “Directly acquiring” means performing a process (e.g., performing a synthetic or analytical method) to obtain the physical entity or value. “Indirectly acquiring” refers to receiving the physical entity or value from another party or source (e.g., a third party laboratory that directly acquired the physical entity or value). Directly acquiring a physical entity includes performing a process that includes a physical change in a physical substance, e.g., a starting material. Directly acquiring a value includes performing a process that includes a physical change in a sample or another substance, e.g., performing an analytical process which includes a physical change in a substance, e.g., a sample.

[0358] “Antibody molecule” as used herein refers to a protein, e.g., an immunoglobulin chain or fragment thereof, comprising at least one immunoglobulin variable domain structure and/or sequence. An antibody molecule encompasses antibodies (e.g., full-length antibodies) and antibody fragments. In some embodiments, an antibody molecule comprises an antigen binding or functional fragment of a full length antibody, or a full length immunoglobulin chain. For example, a full-length antibody is an immunoglobulin (Ig) molecule (e.g., an IgG antibody) that is naturally occurring or formed by normal immunoglobulin gene fragment recombinatorial processes). In embodiments, an antibody molecule refers to an immunologically active, antigen-binding portion of an immunoglobulin molecule, such as an antibody fragment. An antibody fragment, e.g., functional fragment, is a portion of an antibody, e.g. Fab, Fab′, F(ab′)₂, F(ab)₂, variable fragment (Fv), domain antibody (dAb), or single chain variable fragment (scFv). A functional antibody fragment binds to the same antigen as that recognized by the intact (e.g., full-length) antibody. The terms “antibody fragment” or “functional fragment” also include isolated fragments consisting of the variable regions, such as the “Fv” fragments consisting of the variable regions of the heavy and light chains or recombinant single chain polypeptide molecules in which light and heavy variable regions are connected by a peptide linker (“scFv proteins”). In some embodiments, an antibody fragment does not include portions of antibodies without antigen binding activity, such as Fc fragments or single amino acid residues. Exemplary antibody molecules include full length antibodies and antibody fragments, e.g., dAb (domain antibody), single chain, Fab, Fab′, and F(ab′)₂ fragments, and single chain variable fragments (scFvs). In some embodiments, the antibody molecule is an antibody mimetic. In some embodiments, the antibody molecule is, or comprises, an antibody-like framework or scaffold, such as, fibronectins, ankyrin repeats (e.g., designed ankyrin repeat proteins (DARPins)), avimers, affibody affinity ligands, anticalins, or affilin molecules.

[0359] The term “human-like antibody molecule” as used herein refers to a humanized antibody molecule, human antibody molecule or an antibody molecule having at least 95% sequence identity with a non-murine germline framework region, e.g., FR1, FR2, FR3 and/or FR4. In some embodiments, the human-like antibody molecule comprises a framework region having at least 95% sequence identity to a human germline framework region, e.g., a FR1, FR2, FR3 and/or FR4 of a human germline framework region. In some embodiments, the human-like antibody molecule is a recombinant antibody. In some embodiments, the human-like antibody molecule is a humanized antibody molecule. In some embodiments, the human-like antibody molecule is human antibody molecule. In some embodiments, the human-like antibody molecule is a phage display or a yeast display antibody molecule. In some embodiments, the human-like antibody molecule is a chimeric antibody molecule. In some embodiments, the human-like antibody molecule is a CDR grafted antibody molecule.

[0360] As used herein, an “immunoglobulin variable domain sequence” refers to an amino acid sequence which can form the structure of an immunoglobulin variable domain. For example, the sequence may include all or part of the amino acid sequence of a naturally-occurring variable domain. For example, the sequence may or may not include one, two, or more N- or C-terminal amino acids, or may include other alterations that are compatible with formation of the protein structure.

[0361] In embodiments, an antibody molecule is monospecific, e.g., it comprises binding specificity for a single epitope. In some embodiments, an antibody molecule is multispecific, e.g., it comprises a plurality of immunoglobulin variable domain sequences, where a first immunoglobulin variable domain sequence has binding specificity for a first epitope and a second immunoglobulin variable domain sequence has binding specificity for a second epitope. In some embodiments, an antibody molecule is a bispecific antibody molecule. “Bispecific antibody molecule” as used herein refers to an antibody molecule that has specificity for more than one (e.g., two, three, four, or more) epitope and/or antigen.

[0362] “Antigen” (Ag) as used herein refers to a molecule that can provoke an immune response, e.g., involving activation of certain immune cells and/or antibody generation. Any macromolecule, including almost all proteins or peptides, can be an antigen. Antigens can also be derived from genomic recombinant or DNA. For example, any DNA comprising a nucleotide sequence or a partial nucleotide sequence that encodes a protein capable of eliciting an immune response encodes an “antigen.” In embodiments, an antigen does not need to be encoded solely by a full length nucleotide sequence of a gene, nor does an antigen need to be encoded by a gene at all. In embodiments, an antigen can be synthesized or can be derived from a biological sample, e.g., a tissue sample, a tumor sample, a cell, or a fluid with other biological components. As used, herein a “tumor antigen” or interchangeably, a “cancer antigen” includes any molecule present on, or associated with, a cancer, e.g., a cancer cell or a tumor microenvironment that can provoke an immune response. As used, herein an “immune cell antigen” includes any molecule present on, or associated with, an immune cell that can provoke an immune response.

[0363] The “antigen-binding site,” or “binding portion” of an antibody molecule refers to the part of an antibody molecule, e.g., an immunoglobulin (Ig) molecule, that participates in antigen binding. In embodiments, the antigen binding site is formed by amino acid residues of the variable (V) regions of the heavy (H) and light (L) chains. Three highly divergent stretches within the variable regions of the heavy and light chains, referred to as hypervariable regions, are disposed between more conserved flanking stretches called “framework regions,” (FRs). FRs are amino acid sequences that are naturally found between, and adjacent to, hypervariable regions in immunoglobulins. In embodiments, in an antibody molecule, the three hypervariable regions of a light chain and the three hypervariable regions of a heavy chain are disposed relative to each other in three dimensional space to form an antigen-binding surface, which is complementary to the three-dimensional surface of a bound antigen. The three hypervariable regions of each of the heavy and light chains are referred to as “complementarity-determining regions,” or “CDRs.” The framework region and CDRs have been defined and described, e.g., in Kabat. E. A., et al. (1991) Sequences of Proteins of Immunological Interest. Fifth Edition, U.S. Department of Health and Human Services, NIH Publication No. 91-3242, and Chothia, C et al. (1987) J. Mol. Biol. 196:901-917. Each variable chain (e.g., variable heavy chain and variable light chain) is typically made up of three CDRs and four FRs, arranged from amino-terminus to carboxy-terminus in the amino acid order: FR1, CDR1, FR2, CDR2, FR3, CDR3, and FR4.

[0364] As used herein, an “immune cell” refers to any of various cells that function in the immune system. e.g., to protect against agents of infection and foreign matter. In embodiments, this term includes leukocytes. e.g., neutrophils, eosinophils, basophils, lymphocytes, and monocytes. Innate leukocytes include phagocytes (e.g., macrophages, neutrophils, and dendritic cells), mast cells, eosinophils, basophils, and natural killer cells. Innate leukocytes identify and eliminate pathogens, either by attacking larger pathogens through contact or by engulfing and then killing microorganisms, and are mediators in the activation of an adaptive immune response. The cells of the adaptive immune system are special types of leukocytes, called lymphocytes. B cells and T cells are important types of lymphocytes and are derived from hematopoietic stem cells in the bone marrow. B cells are involved in the humoral immune response, whereas T cells are involved in cell-mediated immune response. The term “immune cell” includes immune effector cells.

[0365] “Immune effector cell,” as that term is used herein, refers to a cell that is involved in an immune response, e.g., in the promotion of an immune effector response. Examples of immune effector cells include, but are not limited to, T cells, e.g., alpha/beta T cells and gamma/delta T cells, B cells, natural killer (NK) cells, natural killer T (NK T) cells, and mast cells.

[0366] The term “effector function” or “effector response” refers to a specialized function of a cell. Effector function of a T cell, for example, may be cytolytic activity or helper activity including the secretion of cytokines.

[0367] The terms “polypeptide”, “peptide” and “protein” (if single chain) are used interchangeably herein to refer to polymers of amino acids of any length. The polymer may be linear or branched, it may comprise modified amino acids, and it may be interrupted by non-amino acids. The terms also encompass an amino acid polymer that has been modified, for example, disulfide bond formation, glycosylation, lipidation, acetylation, phosphorylation, or any other manipulation, such as conjugation with a labeling component. The polypeptide can be isolated from natural sources, can be a produced by recombinant techniques from a eukaryotic or prokaryotic host, or can be a product of synthetic procedures.

[0368] The terms “nucleic acid.” “nucleic acid sequence.” “nucleotide sequence,” or “polynucleotide sequence.” and “polynucleotide” are used interchangeably. They refer to a polymeric form of nucleotides of any length, either deoxyribonucleotides or ribonucleotides, or analogs thereof. The polynucleotide may be either single-stranded or double-stranded, and if single-stranded may be the coding strand or non-coding (antisense) strand. A polynucleotide may comprise modified nucleotides, such as methylated nucleotides and nucleotide analogs. The sequence of nucleotides may be interrupted by non-nucleotide components. A polynucleotide may be further modified after polymerization, such as by conjugation with a labeling component. The nucleic acid may be a recombinant polynucleotide, or a polynucleotide of genomic, cDNA, semisynthetic, or synthetic origin which either does not occur in nature or is linked to another polynucleotide in a non-natural arrangement.

[0369] The term “isolated,” as used herein, refers to material that is removed from its original or native environment (e.g., the natural environment if it is naturally occurring). For example, a naturally-occurring polynucleotide or polypeptide present in a living animal is not isolated, but the same polynucleotide or polypeptide, separated by human intervention from some or all of the co-existing materials in the natural system, is isolated. Such polynucleotides could be part of a vector and/or such polynucleotides or polypeptides could be part of a composition, and still be isolated in that such vector or composition is not part of the environment in which it is found in nature. An isolated polynucleotide (ribonucleic acid (RNA), deoxyribonucleic acid (DNA)), or polypeptide is free of the genes/nucleic acids or sequences/amino acids that flank it in its naturally-occurring state.

[0370] The compositions and methods of the present invention encompass polypeptides and nucleic acids having the sequences specified, or sequences substantially identical or similar thereto, e.g., sequences at least 80%, 85%, 90%, 95% identical or higher to the sequence specified. In the context of an amino acid sequence, the term “substantially identical” is used herein to refer to a first amino acid that contains a sufficient or minimum number of amino acid residues that are i) identical to, or ii) conservative substitutions of aligned amino acid residues in a second amino acid sequence such that the first and second amino acid sequences can have a common structural domain and/or common functional activity. For example, amino acid sequences that contain a common structural domain having at least about 80%, 85%, 90%, 91%, 92%, 93%, 94%, 95%, 96%, 97%, 98% 99%, 99.5%, 99.9%, or 100% sequence identity to a reference sequence, e.g., a sequence provided herein. In the context of nucleotide sequence, the term “substantially identical” is used herein to refer to a first nucleic acid sequence that contains a sufficient or minimum number of nucleotides that are identical to aligned nucleotides in a second nucleic acid sequence such that the first and second nucleotide sequences encode a polypeptide having common functional activity, or encode a common structural polypeptide domain or a common functional polypeptide activity. For example, nucleotide sequences having at least about 80%, 85%, 90%, 91%, 92%, 93%, 94%, 95%, 96%, 97%, 98% 99%, 99.5%, 99.9%, or 100% sequence identity to a reference sequence, e.g., a sequence provided herein.

[0371] The term “variant” refers to a polypeptide that has a substantially identical amino acid sequence to a reference amino acid sequence, or is encoded by a substantially identical nucleotide sequence. In some embodiments, the variant is a functional variant. In some embodiments, a TCRβV variant can bind to TCRα and form a TCR α:β complex.

[0372] The term “functional variant” refers to a polypeptide that has a substantially identical amino acid sequence to a reference amino acid sequence, or is encoded by a substantially identical nucleotide sequence, and is capable of having one or more activities of the reference amino acid sequence.

[0373] Calculations of homology or sequence identity between sequences (the terms are used interchangeably herein) are performed as follows. To determine the percent identity of two amino acid sequences, or of two nucleic acid sequences, the sequences are aligned for optimal comparison purposes (e.g., gaps can be introduced in one or both of a first and a second amino acid or nucleic acid sequence for optimal alignment and non-homologous sequences can be disregarded for comparison purposes). In a preferred embodiment, the length of a reference sequence aligned for comparison purposes is at least 30%, preferably at least 40%, more preferably at least 50%, 60%, and even more preferably at least 70%, 80%, 90%, 100% of the length of the reference sequence. The amino acid residues or nucleotides at corresponding amino acid positions or nucleotide positions are then compared. When a position in the first sequence is occupied by the same amino acid residue or nucleotide as the corresponding position in the second sequence, then the molecules are identical at that position (as used herein amino acid or nucleic acid “identity” is equivalent to amino acid or nucleic acid “homology”).

[0374] The percent identity between the two sequences is a function of the number of identical positions shared by the sequences, taking into account the number of gaps, and the length of each gap, which need to be introduced for optimal alignment of the two sequences. The comparison of sequences and determination of percent identity between two sequences can be accomplished using a mathematical algorithm. In a preferred embodiment, the percent identity between two amino acid sequences is determined using the Needleman and Wunsch ((1970) J. Mol. Biol. 48:444-453) algorithm which has been incorporated into the GAP program in the GCG software package (available at http://www.gcg.com), using either a Blossum 62 matrix or a PAM250 matrix, and a gap weight of 16, 14, 12, 10, 8, 6, or 4 and a length weight of 1, 2, 3, 4, 5, or 6. In yet another preferred embodiment, the percent identity between two nucleotide sequences is determined using the GAP program in the GCG software package (available at http://www.gcg.com), using a NWSgapdna.CMP matrix and a gap weight of 40, 50, 60, 70, or 80 and a length weight of 1, 2, 3, 4, 5, or 6. A particularly preferred set of parameters (and the one that should be used unless otherwise specified) are a Blossum 62 scoring matrix with a gap penalty of 12, a gap extend penalty of 4, and a frameshift gap penalty of 5.

[0375] The percent identity between two amino acid or nucleotide sequences can be determined using the algorithm of E. Meyers and W. Miller ((1989) CABIOS, 4:11-17) which has been incorporated into the ALIGN program (version 2.0), using a PAM120 weight residue table, a gap length penalty of 12 and a gap penalty of 4. The nucleic acid and protein sequences described herein can be used as a “query sequence” to perform a search against public databases to, for example, identify other family members or related sequences. Such searches can be performed using the NBLAST and XBLAST programs (version 2.0) of Altschul, et al. (1990) J. Mol. Biol. 215:403-10. BLAST nucleotide searches can be performed with the NBLAST program, score=100, wordlength=12 to obtain nucleotide sequences homologous to a nucleic acid molecule of the invention. BLAST protein searches can be performed with the XBLAST program, score =50, wordlength=3 to obtain amino acid sequences homologous to protein molecules of the invention. To obtain gapped alignments for comparison purposes. Gapped BLAST can be utilized as described in Altschul et al., (1997) Nucleic Acids Res. 25:3389-3402. When utilizing BLAST and Gapped BLAST programs, the default parameters of the respective programs (e.g., XBLAST and NBLAST) can be used.

[0376] It is understood that the molecules of the present invention may have additional conservative or non-essential amino acid substitutions, which do not have a substantial effect on their functions.

[0377] The term “amino acid” is intended to embrace all molecules, whether natural or synthetic, which include both an amino functionality and an acid functionality and capable of being included in a polymer of naturally-occurring amino acids. Exemplary amino acids include naturally-occurring amino acids: analogs, derivatives and congeners thereof; amino acid analogs having variant side chains; and all stereoisomers of any of any of the foregoing. As used herein the term “amino acid” includes both the D- or L-optical isomers and peptidomimetics.

[0378] A “conservative amino acid substitution” is one in which the amino acid residue is replaced with an amino acid residue having a similar side chain. Families of amino acid residues having similar side chains have been defined in the art. These families include amino acids with basic side chains (e.g., lysine, arginine, histidine), acidic side chains (e.g., aspartic acid, glutamic acid), uncharged polar side chains (e.g., glycine, asparagine, glutamine, serine, threonine, tyrosine, cysteine), nonpolar side chains (e.g., alanine, valine, leucine, isoleucine, proline, phenylalanine, methionine, tryptophan), beta-branched side chains (e.g., threonine, valine, isoleucine) and aromatic side chains (e.g., tyrosine, phenylalanine, tryptophan, histidine).

[0379] As used herein, the term “molecule” as used in, e.g., antibody molecule, cytokine molecule, receptor molecule, includes full-length, naturally-occurring molecules, as well as variants, e.g., functional variants (e.g., truncations, fragments, mutated (e.g., substantially similar sequences) or derivatized form thereof), so long as at least one function and/or activity of the unmodified (e.g., naturally-occurring) molecule remains.

[0380] As used herein, the term “mutation” refers to an alteration in the nucleotide sequence of the genome of an organism, virus, or extrachromosomal DNA. In some embodiments, the mutation may be a large-scale mutation, such as amplifications (or gene duplications) or repetitions of a chromosomal segment, deletions of large chromosomal regions, chromosomal rearrangements (e.g., chromosomal translocations, chromosomal inversions, non-homologous chromosomal crossover, and interstitial deletions), and loss of heterozygosity. In some embodiments, the mutation may be a small-scale mutation, such as insertions, deletions, and substitution mutations. As used herein, the term “substitution mutation” refers to the transition that exchange a single nucleotide for another.

[0381] “Interleukin-2” also known as IL2, IL-2, IL 2, TCGF, lymphokine, and interleukin 2, as referred to herein, includes any of the recombinant or naturally-occurring forms of IL-2 or variants or homologs thereof that have or maintain IL-2 activity (e.g., at least 40% 50%, 60%, 70%, 80%, 90%, 95%, 96%, 97%, 98%, 99% or 100% activity) In some aspects, the variants or homologs have at least 40%, 45%, 50%, 55%, 60%, 65%, 70%, 75%, 80%, 85%, 90%, 95%, 96%, 97%, 98%, 99% or 100% amino acid sequence identity across the whole sequence or a portion of the sequence (e.g., a 50, 100, 150 or 200 continuous amino acid portion) compared to a naturally occurring IL-2. In some embodiments, IL-2 is substantially identical to the protein identified by the UniProt reference number P60568 or a variant or homolog having substantial identity thereto.

### Anti-TCRβV Antibodies

### Human T Cell Receptor (TCR) Complex

[0382] TCR is a disulfide-linked membrane-anchored heterodimeric protein normally consisting of the highly variable alpha (α) and beta (β) chains expressed as part of a complex with the invariant CD3 chain molecules. TCR on αβ T cells is formed by a heterodimer of one alpha chain and one beta chain. Each alpha or beta chain consists of a constant domain and a highly variable domain classified as the Immunoglobulin superfamily (IgSF) fold. The TCRβV chains can be further classified into 30 subfamilies (TRBV1-30) Despite their high structural and functional homology, the amino acid sequence homology in the TRBV genes is very low. Only 4 amino acids out of approximately 95 are identical while 10 additional amino acids are conserved among all subfamilies (see, an alignment of TCRβV amino acid sequences in Table 9). Nevertheless, TCRs formed between alpha and beta chains of highly diverse sequences show a remarkable structural homology (FIGS. 25A and 25B) and elicit a similar function, e.g., activation of T cells.

[0383] T cell receptors (TCR) can be found on the surface of T cells. TCRs recognize antigens, e.g., peptides, presented on, e.g., bound to, major histocompatibility complex (MHC) molecules on the surface of cells, e.g., antigen-presenting cells. TCRs are heterodimeric molecules and can comprise an alpha chain, a beta chain, a gamma chain or a delta chain. TCRs comprising an alpha chain and a beta chain are also referred to as TCRαβ. The TCR beta chain consists of the following regions (also known as segments): variable (V), diversity (D), joining (J) and constant (C) (see Mayer G, and Nyland J. (2010) Chapter 10: Major Histocompatibility Complex and T-cell Receptors-Role in Immune Responses. In: Microbiology and Immunology on-line. University of South Carolina School of Medicine). The TCR alpha chain consists of V. J and C regions. The rearrangement of the T-cell receptor (TCR) through somatic recombination of V (variable), D (diversity), J (joining), and C (constant) regions is a defining event in the development and maturation of a T cell. TCR gene rearrangement takes place in the thymus.

[0384] TCRs can comprise a receptor complex, known as the TCR complex, which comprises a TCR heterodimer comprising of an alpha chain and a beta chain, and dimeric signaling molecules, e.g., CD3 co-receptors, e.g., CD3δ/ε, and/or CD3γ/ε.

[0385] As used herein, the term “T cell receptor beta variable chain” or “TCRβV,” refers to an extracellular region of the T cell receptor beta chain which comprises the antigen recognition domain of the T cell receptor. The term TCRβV includes isoforms, mammalian, e.g., human TCRβV, species homologs of human and analogs comprising at least one common epitope with TCRβV. Human TCRβV comprises a gene family comprising subfamilies including, but not limited to: a TCRβ V6 subfamily, a TCRβ V10 subfamily, a TCRβ V12 subfamily, a TCRβ V5 subfamily, a TCRβ V7 subfamily, a TCRβ V11 subfamily, a TCRβ V14 subfamily, a TCRβ V16 subfamily, a TCRβ V18 subfamily, a TCRβ V9 subfamily, a TCRβ V13 subfamily, a TCRβ V4 subfamily, a TCRβ V3 subfamily, a TCRβ V2 subfamily, a TCRβ V15 subfamily, a TCRβ V30 subfamily, a TCRβ V19 subfamily, a TCRβ V27 subfamily, a TCRβ V28 subfamily, a TCRβ V24 subfamily, a TCRβ V20 subfamily, TCRβ V25 subfamily, a TCRβ V29 subfamily, a TCRβ V1 subfamily, a TCRβ V17 subfamily, a TCRβ V21 subfamily, a TCRβ V23 subfamily, or a TCRβ V26 subfamily, as well as family members of said subfamilies, and variants thereof (e.g., a structural or functional variant thereof). In some embodiments, the TCRβ V6 subfamily comprises: TCRβ V6-4*01, TCRβ V6-4*02, TCRβ V6-9*01, TCRβ V6-8*01, TCRβ V6-5*01, TCRβ V6-6*02, TCRβ V6-6*01, TCRβ V6-2*01, TCRβ V6-3*01 or TCRβ V6-1*01. In some embodiments, TCRβV comprises TCRβ V6-5*01, or a variant thereof, e.g., a variant having 85%, 90%, 95%, 99% or more identity the naturally-occurring sequence. TCRβ V6-5*01 is also known as TRBV65; TCRβV6S5; TCRβV13S1, or TCRβ V13.1. The amino acid sequence of TCRβ V6-5*01, e.g., human TCRβ V6-5*01, is known in that art, e.g., as provided by IMGT ID L36092. In some embodiments. TCRβ V6-5*01 is encoded by the nucleic acid sequence of SEQ ID NO: 43, or a sequence having 85%, 90%, 95%, 99% or more identity thereof. In some embodiments, TCRβ V6-5*01 comprises the amino acid sequence of SEQ ID NO: 44, or a sequence having 85%, 90%, 95%, 99% or more identity thereof.

SEQ ID NO: 43
ATGAGCATCGGCCTCCTGTGCTGTGCAGCCTTGTCTCTCCTGTGGGCAG
GTCCAGTGAATGCTGGTGTCACTCAGACCCCAAAATTCCAGGTCCTGAA
GACAGGACAGAGCATGACACTGCAGTGTGCCCAGGATATGAACCATGAA
TACATGTCCTGGTATCGACAAGACCCAGGCATGGGGCTGAGGCTGATTC
ATTACTCAGTTGGTGCTGGTATCACTGACCAAGGAGAAGTCCCCAATGG
CTACAATGTCTCCAGATCAACCACAGAGGATTTCCCGCTCAGGCTGCTG
TCGGCTGCTCCCTCCCAGACATCTGTGTACTTCTGTGCCAGCAGTTACT
C
SEQ ID NO: 44
MSIGLLCCAALSLLWAGPVNAGVTQTPKFQVLKTGQSMTLQCAQDMNHE
YMSWYRQDPGMGLRLIHYSVGAGITDQGEVPNGYNVSRSTTEDFPLRLL
SAAPSQTSVYFCASSY

### TCR Beta V (TCRβV)

[0386] Diversity in the immune system enables protection against a huge array of pathogens. Since the germline genome is limited in size, diversity is achieved not only by the process of V (D) J recombination but also by junctional (junctions between V-D and D-J segments) deletion of nucleotides and addition of pseudo-random, non-templated nucleotides. The TCR beta gene undergoes gene arrangement to generate diversity.

[0387] The TCR V beta repertoire varies between individuals and populations because of, e.g., 7 frequently occurring inactivating polymorphisms in functional gene segments and a large insertion/deletion-related polymorphism encompassing 2 V beta gene segments.

[0388] Provided herein are, inter alia, antibody molecules and fragments thereof, that bind, e.g., specifically bind, to a human TCR beta V chain (TCRβV), e.g., a TCRβV gene family (also referred to as a group), e.g., a TCRβV subfamily (also referred to as a subgroup), e.g., as described herein. TCR beta V families and subfamilies are known in the art, e.g., as described in Yassai et al., (2009) Immunogenetics 61(7) pp: 493-502; Wei S, and Concannon P. (1994) Human Immunology 41(3) pp: 201-206. The antibodies described herein can be recombinant antibodies, e.g., recombinant non-murine antibodies, e.g., recombinant human or humanized antibodies.

[0389] The terms TCRBV, TCRVB, TRBV, TCRβV, TCRVβ or TRβV are used interchangeably herein and refer to a TCR beta V chain, e.g., as described herein.

[0390] In some embodiments, provided herein is an anti-TCRβV antibody molecule that binds to human TCRβV, e.g., a TCRβV family, e.g., gene family or a variant thereof. In some embodiments a TCRβV gene family comprises one or more subfamilies, e.g., as described herein, e.g., in FIG. 4, Table 8A or Table 8B. In some embodiments, the TCRβV gene family comprises: a TCRβ V6 subfamily, a TCRβ V10 subfamily, a TCRβ V12 subfamily, a TCRβ V5 subfamily, a TCRβ V7 subfamily, a TCRβ V11 subfamily, a TCRβ V14 subfamily, a TCRβ V16 subfamily, a TCRβ V18 subfamily, a TCRβ V9 subfamily, a TCRβ V13 subfamily, a TCRβ V4 subfamily, a TCRβ V3 subfamily, a TCRβ V2 subfamily, a TCRβ V15 subfamily, a TCRβ V30 subfamily, a TCRβ V19 subfamily, a TCRβ V27 subfamily, a TCRβ V28 subfamily, a TCRβ V24 subfamily, a TCRβ V20 subfamily, TCRβ V25 subfamily, a TCRβ V29 subfamily, a TCRβ V1 subfamily, a TCRβ V17 subfamily, a TCRβ V21 subfamily, a TCRβ V23 subfamily, or a TCRβ V26 subfamily.

[0391] In some embodiments, TCRβ V6 subfamily is also known as TCRβ V13.1. In some embodiments, the TCRβ V6 subfamily comprises: TCRβ V6-4*01, TCRβ V6-4*02, TCRβ V6-9*01, TCRβ V6-8*01, TCRβ V6-5*01, TCRβ V6-6*02, TCRβ V6-6*01, TCRβ V6-2*01, TCRβ V6-3*01 or TCRβ V6-1*01, or a variant thereof. In some embodiments, TCRβ V6 comprises TCRβ V6-4*01, or a variant thereof. In some embodiments. TCRβ V6 comprises TCRβ V6-4*02, or a variant thereof. In some embodiments, TCRβ V6 comprises TCRβ V6-9*01, or a variant thereof. In some embodiments. TCRβ V6 comprises TCRβ V6-8*01, or a variant thereof. In some embodiments, TCRβ V6 comprises TCRβ V6-5*01, or a variant thereof. In some embodiments, TCRβ V6 comprises TCRβ V6-6*02, or a variant thereof. In some embodiments, TCRβ V6 comprises TCRβ V6-6*01, or a variant thereof. In some embodiments, TCRβ V6 comprises TCRβ V6-2*01, or a variant thereof. In some embodiments. TCRβ V6 comprises TCRβ V6-3*01, or a variant thereof. In some embodiments, TCRβ V6 comprises TCRβ V6-1*01, or a variant thereof.

[0392] In some embodiments, TCRβ V6 comprises TCRβ V6-5*01, or a variant thereof. In some embodiments. TCRβ V6, e.g., TCRβ V6-5*01, is recognized, e.g., bound, by SEQ ID NO: 1 and/or SEQ ID NO: 2. In some embodiments. TCRβ V6, e.g., TCRβ V6-5*01, is recognized, e.g., bound, by SEQ ID NO: 9 and/or SEQ ID NO: 10. In some embodiments, TCRβ V6 is recognized, e.g., bound, by SEQ ID NO: 9 and/or SEQ ID NO: 11.

[0393] In some embodiments, TCRβ V10 subfamily is also known as TCRβ V12. In some embodiments, the TCRβ V10 subfamily comprises: TCRβ V10-1*01, TCRβ V10-1*02, TCRβ V10-3*01 or TCRβ V10-2*01, or a variant thereof.

[0394] In some embodiments, TCRβ V12 subfamily is also known as TCRβ V8.1. In some embodiments, the TCRβ V12 subfamily comprises: TCRβ V12-4*01, TCRβ V12-3*01, or TCRβ V12-5*01, or a variant thereof. In some embodiments, TCRβ V12 is recognized, e.g., bound, by SEQ ID NO: 15 and/or SEQ ID NO: 16. In some embodiments, TCRβ V12 is recognized, e.g., bound, by any one of SEQ ID NOs 23-25, and/or any one of SEQ ID NO: 26-30:

[0395] In some embodiments, the TCRβ V5 subfamily is chosen from: TCRβ V5-5*01, TCRβ V5-6*01, TCRβ V5-4*01, TCRβ V5-8*01, TCRβ V5-1*01, or a variant thereof.

[0396] In some embodiments, the TCRβ V7 subfamily comprises TCRβ V7-7*01, TCRβ V7-6*01, TCRβ V7-8*02, TCRβ V7-4*01, TCRβ V7-2*02, TCRβ V7-2*03, TCRβ V7-2*01, TCRβ V7-3*01, TCRβ V7-9*03, or TCRβ V7-9*01, or a variant thereof.

[0397] In some embodiments, the TCRβ V11 subfamily comprises: TCRβ V11-1*01, TCRβ V11-2*01 or TCRβ V11-3*01, or a variant thereof. In some embodiments, the TCRβ V14 subfamily comprises TCRβ V14*01, or a variant thereof. In some embodiments, the TCRβ V16 subfamily comprises TCRβ V16*01, or a variant thereof. In some embodiments, the TCRβ V18 subfamily comprises TCRβ V18*01, or a variant thereof. In some embodiments, the TCRβ V9 subfamily comprises TCRβ V9*01 or TCRβ V9*02, or a variant thereof. In some embodiments, the TCRβ V13 subfamily comprises TCRβ V13*01, or a variant thereof. In some embodiments, the TCRβ V4 subfamily comprises TCRβ V4-2*01, TCRβ V4-3*01, or TCRβ V4-1*01, or a variant thereof. In some embodiments, the TCRβ V3 subfamily comprises TCRβ V3-1*01, or a variant thereof. In some embodiments, the TCRβ V2 subfamily comprises TCRβ V2*01, or a variant thereof. In some embodiments, the TCRβ VIS subfamily comprises TCRβ V15*01, or a variant thereof. In some embodiments, the TCRβ V30 subfamily comprises TCRβ V30*01, or TCRβ V30*02, or a variant thereof. In some embodiments, the TCRβ V19 subfamily comprises TCRβ V19*01, or TCRβ V19*02, or a variant thereof. In some embodiments, the TCRβ V27 subfamily comprises TCRβ V27*01, or a variant thereof. In some embodiments, the TCRβ V28 subfamily comprises TCRβ V28*01, or a variant thereof. In some embodiments, the TCRβ V24 subfamily comprises TCRβ V24-1*01, or a variant thereof. In some embodiments, the TCRβ V20 subfamily comprises TCRβ V20-1*01, or TCRβ V20-1*02, or a variant thereof. In some embodiments, the TCRβ V25 subfamily comprises TCRβ V25-1*01, or a variant thereof. In some embodiments, the TCRβ V29 subfamily comprises TCRβ V29-1*01, or a variant thereof.

[0398] Exemplary amino acid sequences for TCRβV subfamily members can be found on the ImMunoGene Tics Information System website: http://www.imgt.org/, or in a similar resource.

### Anti-TCRβV Antibodies

[0399] Current bispecific constructs designed to redirect T cells to promote tumor cell lysis for cancer immunotherapy typically utilize antibody fragments (Fab, scFv. VH, single domain antibody, etc.) that are derived from monoclonal antibodies (mAb) directed against the CD3e subunit of the T cell receptor (TCR). However, there are limitations to this approach which may prevent the full realization of the therapeutic potential for such bispecific constructs. Previous studies have shown that even low “activating” doses of anti-CD3e mAb can cause long-term T cell dysfunction and exert immunosuppressive effects. In addition, anti-CD3e mAbs have been associated with side effects that result from massive T cell activation. The large number of activated T cells secrete substantial amounts of cytokines, the most important of which is Interferon gamma (IFNγ). This excess amount of IFNγ in turn activates macrophages which then overproduce proinflammatory cytokines such as IL-1beta, IL-6, IL-10 and TNF-alpha, causing a “cytokine storm” known as the cytokine release syndrome (CRS) (Shimabukuro-Vornhagen et al., J Immunother Cancer. 2018 Jun. 15; 6(1):56, herein incorporated by reference in its entirety). Thus, the need exists for developing antibodies that are capable of binding and activating only a subset of effector T cells, e.g., to re-duce the CRS and/or neurotoxicity (NT).

[0400] Described herein are molecules targeting the TCRβV chain of TCR and methods thereof. Without wishing to be bound by theory, such molecules are capable of binding, activating, and/or expanding only a subset of T cells, avoiding or reducing CRS and/or NT and minimizing potential immunosuppressive effects of anti-CD3 mAbs.

[0401] Described herein is a class of antibodies, i.e., anti-TCRβV antibody molecules as described herein, which despite having low sequence similarity (e.g., low sequence identity among the different antibody molecules that recognize different TCRβV subfamilies), recognize a structurally conserved, yet sequence-wise variable, region, e.g., domain, on the TCRβV protein (as denoted by the circled area in FIG. 25A) and have a similar function (e.g., activation of T cells and a similar cytokine profile as described herein). Thus, the anti-TCRβV antibody molecules as described herein share a structure-function relationship.

[0402] Without wishing to be bound by theory, in some embodiments, the anti-TCRβV antibody molecules as described herein bind to an outward facing epitope of a TCRβV protein when it is in a complex with a TCRalpha protein, e.g., as denoted by the circled area in FIG. 25A. In some embodiments, the anti-TCRβV antibody molecules as described herein recognize (e.g., bind to), a domain (e.g., an epitope) on the TCRβV protein that is: (1) structurally conserved among different TCRβV subfamilies; and (2) has minimal sequence identity among the different TCRβV subfamilies. As shown in Table 9, TCRβV proteins from the different TCRβV subfamilies share minimal sequence similarity. However, as shown in FIG. 25A-25B, TCRβV proteins which have minimal sequence similarity, share a similar 3D conformation and structure.

[0403] The alignment of TCRβV amino acid sequences in Table 9 underscores the diversity of TCR sequences. In particular, the TRBV sequences from different subfamilies are considerably different from each other.

[0404] In some embodiments, the anti-TCRβV antibody molecules as described herein do not recognize, e.g., bind to, an interface of a TCRβV: TCRalpha complex. In some embodiments, the anti-TCRβV antibody molecules as described herein do not recognize, e.g., bind to, a constant region of a TCRβV protein. An exemplary antibody that binds to a constant region of a TCRβV region is JOVI.1 as de-scribed in Viney et al., (Hybridoma. 1992 December: 11 (6): 701-13). In some embodiments, the anti-TCRβV antibody molecules as described herein do not recognize, e.g., bind to, one or more (e.g., all) of a complementarity determining region (e.g., CDR1, CDR2 and/or CDR3) of a TCRβV protein.

[0405] Provided herein are, inter alia, antibody molecules directed to the variable chain of the beta subunit of TCR (TCRβV) which bind and, e.g., activate a subset of T cells. The anti-TCRβV antibody molecules as described herein result in lesser or no production of cytokines associated with CRS, e.g., IL-6, IL-1beta, IL-10 and TNF alpha; and enhanced and/or delayed production of IL-2 and IFNγ. In some embodiments, the anti-TCRβV antibodies as described herein have a cytokine profile, e.g., as described herein, which differs from a cytokine profile of a T cell engager that binds to a receptor or molecule other than a TCRβV region (“a non-TCRβV-binding T cell engager”). In some embodiments, the non-TCRβV-binding T cell engager comprises an antibody that binds to a CD3 molecule (e.g., CD3 epsilon (CD3e) molecule); or a TCR alpha (TCRα) molecule. In some embodiments, the non-TCRβV-binding T cell engager is an OKT3 antibody or an SP34-2 antibody.

[0406] In some embodiments, the anti-TCRβV antibodies as described herein result in expansion of TCRβV+ T cells, e.g., a subset of memory effector T cells known as TEMRA. Without wishing to be bound by theory, it is believed that in some embodiments, TEMRA cells can promote tumor cell lysis but not CRS. Accordingly, provided herein are methods of making said anti-TCRβV antibody molecules and uses thereof. Also described herein are multispecific molecules, e.g., bispecific molecules comprising said anti-TCRβV antibody molecules. In some embodiments, compositions comprising anti-TCRβV antibody molecules of the present disclosure, can be used, e.g., to: (1) activate and redirect T cells to promote tumor cell lysis for cancer immuno-therapy; and/or (2) expand TCRβV+ T cells. In some embodiments, compositions comprising anti-TCRβV antibody molecules as described herein limit the harmful side-effects of CRS and/or NT, e.g., CRS and/or NT associated with anti-CD3e targeting.

[0407] In some embodiments, the anti-TCRβV antibody molecule binds to one or more of TRBV2, TRBV3-1, TRBV4-1, TRBV4-2, TRBV4-3, TRBV5-1, TRBV5-4, TRBV5-5, TRBV5-6, TRBV5-8, TRBV6-1, TRBV6-2, TRBV6-3, TRBV6-4, TRBV6-5, TRBV6-6, TRBV6-8, TRBV6-9, TRBV7-2, TRBV7-3, TRBV7-4, TRBV7-6, TRBV7-7, TRBV7-8, TRBV7-9, TRBV9, TRBV10-1, TRBV10-2, TRBV10-3, TRBV11-1, TRBV11-2, TRBV11-3, TRBV12-3, TRBV12-4, TRBV12-5, TRBV13, TRBV14, TRBV15, TRBV16, TRBV18, TRBV 19, TRBV20-1, TRBV24-1, TRBV25-1, TRBV27, TRBV28, TRBV29-1 and TRBV30. In some embodiments, the anti-TCRβV antibody molecule binds to one or more of TRBV6-1, TRBV6-2, TRBV6-3, TRBV6-4, TRBV6-5, TRBV6-6, TRBV6-8 and TRBV6-9. In some embodiments, the anti-TCRβV antibody molecule is an anti-TRBV2, anti-TRBV3-1, anti-TRBV4-1, anti-TRBV4-2, anti-TRBV4-3, anti-TRBV5-1, anti-TRBV5-4, anti-TRBV5-5, anti-TRBV5-6, anti-TRBV5-8, anti-TRBV6-1, anti-TRBV6-2, anti-TRBV6-3, anti-TRBV6-4, anti-TRBV6-5, anti-TRBV6-6, anti-TRBV6-8, anti-TRBV6-9, anti-TRBV7-2, anti-TRBV7-3, anti-TRBV7-4, anti-TRBV7-6, anti-TRBV7-7, anti-TRBV7-8, anti-TRBV7-9, anti-TRBV9, anti-TRBV10-1, anti-TRBV10-2, anti-TRBV 10-3, anti-TRBV11-1, anti-TRBV11-2, anti-TRBV11-3, anti-TRBV 12-3, anti-TRBV 12-4, anti-TRBV12-5, anti-TRBV13, anti-TRBV14, anti-TRBV15, anti-TRBV16, anti-TRBV18, anti-TRBV19, anti-TRBV20-1, anti-TRBV24-1, anti-TRBV25-1, anti-TRBV27, anti-TRBV28, anti-TRBV29-1, or anti-TRBV30. Exemplary anti-TCRβV antibody molecules and the corresponding TCRβV subfamilies recognized by said anti-TCRβV antibody molecules are disclosed in Table 10A.

[0408] In some embodiments, the anti-TCRβV antibody molecule binds specifically to TRBV2, TRBV3-1. TRBV4-1, TRBV4-2, TRBV4-3, TRBV5-1, TRBV5-4, TRBV5-5, TRBV5-6, TRBV5-8, TRBV6-1, TRBV6-2, TRBV6-3, TRBV6-4, TRBV6-5, TRBV6-6, TRBV6-8, TRBV6-9, TRBV7-2, TRBV7-3, TRBV7-4, TRBV7-6, TRBV7-7, TRBV7-8, TRBV7-9, TRBV9, TRBV10-1, TRBV10-2, TRBV10-3, TRBV11-1, TRBV11-2, TRBV11-3, TRBV12-3, TRBV12-4, TRBV12-5, TRBV13, TRBV14, TRBV15, TRBV16, TRBV18, TRBV19, TRBV20-1, TRBV24-1, TRBV25-1, TRBV27, TRBV28, TRBV29-1 or TRBV30. In some embodiments, the anti-TCRβV antibody molecule binds specifically to TRBV6-1. In some embodiments, the anti-TCRβV antibody molecule binds specifically to TRBV6-2. In some embodiments, the anti-TCRβV antibody molecule binds specifically to TRBV6-3. In some embodiments, the anti-TCRβV antibody molecule binds specifically to TRBV6-4. In some embodiments, the anti-TCRβV antibody molecule binds specifically to TRBV6-5. In some embodiments, the anti-TCRβV antibody molecule binds specifically to TRBV6-6. In some embodiments, the anti-TCRβV antibody molecule binds specifically to TRBV6-8. In some embodiments, the anti-TCRβV antibody molecule binds specifically to TRBV6-9.

[0409] In some embodiments, the anti-TCRβV antibody molecule does not bind to TCRβ V12, or binds to TCRβ V12 with an affinity and/or binding specificity that is less than (e.g., less than about 10%, 20%, 30%. 40%, 50%, 60%, 70%, 80%, 90% or about 2-, 5-, or 10-fold) the affinity and/or binding specificity of the 16G8 murine antibody or a humanized version thereof as de-scribed in U.S. Pat. No. 5,861,155.

[0410] In some embodiments, the anti-TCRβV antibody molecule binds to TCRβ V12 with an affinity and/or binding specificity that is greater than (e.g., greater than about 10%, 20%, 30%, 40%, 50%, 60%, 70%, 80%, 90% or about 2-, 5- or 10-fold) the affinity and/or binding specificity of the 16G8 murine antibody or a humanized version thereof as described in U.S. Pat. No. 5,861,155.

[0411] In some embodiments, the anti-TCRβV antibody molecule binds to a TCRβV region other than TCRβ V12 (e.g., TCRβV region as described herein, e.g., TCRβ V6 subfamily (e.g., TCRβ V6-5*01) with an affinity and/or binding specificity that is greater than (e.g., greater than about 10%, 20%, 30%, 40%, 50%, 60%, 70%, 80%, 90% or about 2-, 5-, or 10-fold) the affinity and/or binding specificity of the 16G8 murine antibody or a humanized version thereof as de-scribed in U.S. Pat. No. 5,861,155.

[0412] In some embodiments, the anti-TCRβV antibody molecule does not comprise the CDRs of the Antibody B murine antibody.

[0413] In some embodiments, the anti-TCRβV antibody molecule does not bind to TCRβ V5-5*01 or TCRβ V5-1*01, or binds to TCRβ V5-5*01 or TCRβ V5-1*01 with an affinity and/or binding specificity that is less than (e.g., less than about 10%, 20%, 30%, 40%, 50%, 60%, 70%, 80%, 90% or about 2-, 5-, or 10-fold) the affinity and/or binding specificity of the TM23 murine antibody or a humanized version thereof as described in U.S. Pat. No. 5,861,155.

[0414] In some embodiments, the anti-TCRβV antibody molecule binds to TCRβ V5-5*01 or TCRβ V5-1*01 with an affinity and/or binding specificity that is greater than (e.g., greater than about 10%, 20%, 30%, 40%, 50%, 60%, 70%, 80%, 90% or about 2-, 5-, or 10-fold) the affinity and/or binding specificity of the TM23 murine antibody or a humanized version thereof as de-scribed in U.S. Pat. No. 5,861,155.

[0415] In some embodiments, the anti-TCRβV antibody molecule binds to a TCRβV region other than TCRB V5-5*01 or TCRβ V5-1*01 (e.g., TCRβV region as described herein, e.g., TCRβ V6 subfamily (e.g., TCRβ V6-5*01) with an affinity and/or binding specificity that is greater than (e.g., greater than about 10%, 20%, 30%, 40%, 50%, 60%, 70%, 80%, 90% or about 2-, 5-, or 10-fold) the affinity and/or binding specificity of the TM23 murine antibody or a humanized version thereof as described in U.S. Pat. No. 5,861,155.

[0416] In some embodiments, the anti-TCRβV antibody molecule does not comprise the CDRs of the TM23 murine antibody.

[0417] In some embodiments, the light or the heavy chain variable framework (e.g., the region encompassing at least FR1, FR2, FR3, and optionally FR4) of the anti-TCRβV antibody molecule, e.g., anti-TCRβ V6 (e.g., anti-TCRβ V6-5*01) antibody molecule can be chosen from: (a) a light or heavy chain variable framework including at least 80%, 85%, 87% 90%, 92%, 93%, 95%, 97%, 98%, or 100% of the amino acid residues from a human light or heavy chain variable framework, e.g., a light or heavy chain variable framework residue from a human mature antibody, a human germline sequence, or a human consensus sequence; (b) a light or heavy chain variable framework including from 20% to 80%, 40% to 60%, 60% to 90%, or 70% to 95% of the amino acid residues from a human light or heavy chain variable framework, e.g., a light or heavy chain variable framework residue from a human mature antibody, a human germline sequence, or a human consensus sequence: (c) a non-human framework (e.g., a rodent framework); or (d) a non-human framework that has been modified, e.g., to remove antigenic or cytotoxic determinants, e.g., deimmunized, or partially humanized. In some embodiments, the light or heavy chain variable framework region (particularly FR1, FR2 and/or FR3) includes a light or heavy chain variable framework sequence at least 70, 75, 80, 85, 87, 88, 90, 92, 94, 95, 96, 97, 98, 99% identical or identical to the frameworks of a VL or VH segment of a human germline gene.

[0418] In some embodiments, the anti-TCRβV antibody molecule, e.g., anti-TCRβ V6 (e.g., anti-TCRβ V6-5*01) antibody molecule, comprises a heavy chain variable domain having at least one, two, three, four, five, six, seven, ten, fifteen, twenty or more changes, e.g., amino acid substitutions or deletions, from an amino acid sequence of any one of A-H.1 to A-H.85, e.g., A-H.1, A-H.2 or A-H.68, e.g., the amino acid sequence of the FR region in the entire variable region, e.g., shown in FIG. 2A, or in SEQ ID NO: 9.

[0419] Alternatively, or in combination with the heavy chain substitutions described herein, the anti-TCRβV antibody molecule, e.g., anti-TCRβ V6 (e.g., anti-TCRβ V6-5*01) antibody molecule, comprises a light chain variable domain having at least one, two, three, four, five, six, seven, ten, fifteen, twenty or more amino acid changes, e.g., amino acid substitutions or deletions, from an amino acid sequence of any one of A-H.1 to A-H.85, e.g., A-H.1, A-H.2 or A-H.68, e.g., the amino acid sequence of the FR region in the entire variable region, e.g., shown in FIG. 2B, or in SEQ ID NO: 10 or SEQ ID NO: 11.

[0420] In some embodiments, the anti-TCRβV antibody molecule, e.g., anti-TCRβ V6 (e.g., anti-TCRβ V6-5*01) antibody molecule, includes one, two, three, or four heavy chain framework regions shown in FIG. 2A, or a sequence substantially identical thereto.

[0421] In some embodiments, the anti-TCRβV antibody molecule, e.g., anti-TCRβ V6 (e.g., anti-TCRβ V6-5*01) antibody molecule, includes one, two, three, or four light chain framework regions shown in FIG. 2B, or a sequence substantially identical thereto.

[0422] In some embodiments, the anti-TCRβV antibody molecule, e.g., anti-TCRβ V6 (e.g., anti-TCRβ V6-5*01) antibody molecule, comprises the light chain framework region 1 of A-H.1 or A-H.2, e.g., as shown in FIG. 2B.

[0423] In some embodiments, the anti-TCRβV antibody molecule, e.g., anti-TCRβ V6 (e.g., anti-TCRβ V6-5*01) antibody molecule, comprises the light chain framework region 2 of A-H.1 or A-H.2, e.g., as shown in FIG. 2B.

[0424] In some embodiments, the anti-TCRβV antibody molecule, e.g., anti-TCRβ V6 (e.g., anti-TCRβ V6-5*01) antibody molecule, comprises the light chain framework region 3 of A-H.1 or A-H.2, e.g., as shown in FIG. 2B.

[0425] In some embodiments, the anti-TCRβV antibody molecule, e.g., anti-TCRβ V6 (e.g., anti-TCRβ V6-5*01) antibody molecule, comprises the light chain framework region 4 of A-H.1 or A-H.2, e.g., as shown in FIG. 2B.

[0426] In some embodiments, the anti-TCRβV antibody molecule, e.g., anti-TCRβ V6 (e.g., anti-TCRβ V6-5*01) antibody molecule, comprises a light chain variable domain comprising a framework region, e.g., framework region 1 (FR1), comprising a change, e.g., a substitution (e.g., a conservative substitution) at position 10 according to Kabat numbering. In some embodiments, the FR1 comprises a Phenylalanine at position 10, e.g., a Serine to Phenylalanine substitution. In some embodiments, the substitution is relative to a human germline light chain framework region sequence.

[0427] In some embodiments, the anti-TCRβV antibody molecule, e.g., anti-TCRβ V6 (e.g., anti-TCRβ V6-5*01) antibody molecule, comprises a light chain variable domain comprising a framework region, e.g., framework region 2 (FR2), comprising a change, e.g., a substitution (e.g., a conservative substitution) at a position as described herein according to Kabat numbering. In some embodiments, FR2 comprises a Histidine at position 36, e.g., a substitution at position 36 according to Kabat numbering, e.g., a Tyrosine to Histidine substitution. In some embodiments, FR2 comprises an Alanine at position 46, e.g., a substitution at position 46 according to Kabat numbering, e.g., an Arginine to Alanine substitution. In some embodiments, the substitution is relative to a human germline light chain framework region sequence.

[0428] In some embodiments, the anti-TCRβV antibody molecule, e.g., anti-TCRβ V6 (e.g., anti-TCRβ V6-5*01) antibody molecule, comprises a light chain variable domain comprising a framework region, e.g., framework region 3 (FR3), comprising a change, e.g., a substitution (e.g., a conservative substitution) at a position as described herein according to Kabat numbering. In some embodiments, FR3 comprises a Phenylalanine at position 87, e.g., a substitution at position 87 according to Kabat numbering, e.g., a Tyrosine to Phenylalanine substitution. In some embodiments, the substitution is relative to a human germline light chain framework region sequence.

[0429] In some embodiments, the anti-TCRβV antibody molecule, e.g., anti-TCRβ V6 (e.g., anti-TCRβ V6-5*01) antibody molecule, comprises a light chain variable domain comprising: (a) a framework region 1 (FR1) comprising a Phenylalanine at position 10, e.g., a substitution at position 10 according to Kabat numbering, e.g., a Serine to Phenylalanine substitution; (b) a framework region 2 (FR2) comprising a Histidine at position 36, e.g., a substitution at position 36 according to Kabat numbering, e.g., a Tyrosine to Histidine substitution, and a Alanine at position 46, e.g., a substitution at position 46 according to Kabat numbering, e.g., a Arginine to Alanine substitution; and (c) a framework region 3 (FR3) comprising a Phenylalanine at position 87, e.g., a substitution at position 87 according to Kabat numbering, e.g., a Tyrosine to Phenylalanine substitution, e.g., as shown in the amino acid sequence of SEQ ID NO: 10. In some embodiments, the substitution is relative to a human germline light chain framework region sequence.

[0430] In some embodiments, the anti-TCRβV antibody molecule, e.g., anti-TCRβ V6 (e.g., anti-TCRβ V6-5*01) antibody molecule, comprises a light chain variable domain comprising: (a) a framework region 2 (FR2) comprising a Histidine at position 36, e.g., a substitution at position 36 according to Kabat numbering. e.g., a Tyrosine to Histidine substitution, and a Alanine at position 46, e.g., a substitution at position 46 according to Kabat numbering, e.g., a Arginine to Alanine substitution; and (b) a framework region 3 (FR3) comprising a Phenylalanine at position 87, e.g., a substitution at position 87 according to Kabat numbering. e.g., a Tyrosine to Phenylalanine substitution, e.g., as shown in the amino acid sequence of SEQ ID NO: 11. In some embodiments, the substitution is relative to a human germline light chain framework region sequence.

[0431] In some embodiments, the anti-TCRβV antibody molecule, e.g., anti-TCRβ V6 (e.g., anti-TCRβ V6-5*01) antibody molecule, comprises a light chain variable domain comprising: (a) a framework region 1 (FR1) comprising a change, e.g., a substitution (e.g., a conservative substitution) at one or more (e.g., all) positions as described herein according to Kabat numbering; (b) a framework region 2 (FR2) comprising a change, e.g., a substitution (e.g., a conservative substitution) at one or more (e.g., all) position as described herein according to Kabat numbering and (c) a framework region 3 (FR3) comprising a change, e.g., a substitution (e.g., a conservative substitution) at one or more (e.g., all) position as described herein according to Kabat numbering. In some embodiments, the substitution is relative to a human germline light chain framework region sequence.

[0432] In some embodiments, the anti-TCRβV antibody molecule, e.g., anti-TCRβ V6 (e.g., anti-TCRβ V6-5*01) antibody molecule, comprises the heavy chain framework region 1 of A-H.1 or A-H.2, e.g., as shown in FIG. 2A. In some embodiments, the anti-TCRβV antibody molecule, e.g., anti-TCRβ V6 (e.g., anti-TCRβ V6-5*01) antibody molecule, comprises the heavy chain framework region 2 of A-H.1 or A-H.2, e.g., as shown in FIG. 2A. In some embodiments, the anti-TCRβV antibody molecule, e.g., anti-TCRβ V6 (e.g., anti-TCRβ V6-5*01) antibody molecule, comprises the heavy chain framework region 3 of A-H.1 or A-H.2, e.g., as shown in FIG. 2A. In some embodiments, the anti-TCRβV antibody molecule, e.g., anti-TCRβ V6 (e.g., anti-TCRβ V6-5*01) antibody molecule, comprises the heavy chain framework region 4 of A-H.1 or A-H.2, e.g., as shown in FIG. 2A.

[0433] In some embodiments, the anti-TCRβV antibody molecule, e.g., anti-TCRβ V6 (e.g., anti-TCRβ V6-5*01) antibody molecule, comprises a heavy chain variable domain comprising a framework region, e.g., framework region 3 (FR3), comprising a change, e.g., a substitution (e.g., a conservative substitution) at a position as described herein according to Kabat numbering. In some embodiments, FR3 comprises a Threonine at position 73, e.g., a substitution at position 73 according to Kabat numbering, e.g., a Glutamic Acid to Threonine substitution. In some embodiments, FR3 comprises a Glycine at position 94, e.g., a substitution at position 94 according to Kabat numbering, e.g., an Arginine to Glycine substitution. In some embodiments, the substitution is relative to a human germline heavy chain framework region sequence.

[0434] In some embodiments, the anti-TCRβV antibody molecule, e.g., anti-TCRβ V6 (e.g., anti-TCRβ V6-5*01) antibody molecule, comprises a heavy chain variable domain comprising a framework region 3 (FR3) comprising a Threonine at position 73, e.g., a substitution at position 73 according to Kabat numbering, e.g., a Glutamic Acid to Threonine substitution, and a Glycine at position 94, e.g., a substitution at position 94 according to Kabat numbering, e.g., a Arginine to Glycine substitution, e.g., as shown in the amino acid sequence of SEQ ID NO. 10.

[0435] In some embodiments, the anti-TCRβV antibody molecule, e.g., anti-TCRβ V6 (e.g., anti-TCRβ V6-5*01) antibody molecule, comprises the heavy chain framework regions 1-4 of A-H.1 or A-H.2, e.g., SEQ ID NO: 9, or as shown in FIGS. 2A and 2B. In some embodiments, the anti-TCRβV antibody molecule, e.g., anti-TCRβ V6 (e.g., anti-TCRβ V6-5*01) antibody molecule, comprises the light chain framework regions 1-4 of A-H.1, e.g., SEQ ID NO: 10, or as shown in FIGS. 2A and 2B. In some embodiments, the anti-TCRβV antibody molecule, e.g., anti-TCRβ V6 (e.g., anti-TCRβ V6-5*01) antibody molecule, comprises the light chain framework regions 1-4 of A-H.2, e.g., SEQ ID NO: 11, or as shown in FIGS. 2A and 2B. In some embodiments, the anti-TCRβV antibody molecule, e.g., anti-TCRβ V6 (e.g., anti-TCRβ V6-5*01) antibody molecule, comprises the heavy chain framework regions 1-4 of A-H.1, e.g., SEQ ID NO. 9; and the light chain framework regions 1-4 of A-H.1, e.g., SEQ ID NO: 10, or as shown in FIGS. 2A and 2B. In some embodiments, the anti-TCRβV antibody molecule, e.g., anti-TCRβ V6 (e.g., anti-TCRβ V6-5*01) antibody molecule, comprises the heavy chain framework regions 1-4 of A-H.2, e.g., SEQ ID NO: 9; and the light chain framework regions 1-4 of A-H.2, e.g., SEQ ID NO: 11, or as shown in FIGS. 2A and 2B.

[0436] In some embodiments, the heavy or light chain variable domain, or both, of the anti-TCRβV antibody molecule, e.g., anti-TCRβ V6 (e.g., anti-TCRβ V6-5*01) antibody molecule, includes an amino acid sequence, which is substantially identical to an amino acid as described herein, e.g., at least 80%, 85%, 90%, 92%, 95%, 97%, 98%, 99% or higher identical to a variable region of an antibody described herein, e.g., an antibody chosen from any one of A-H.1 to A-H.85, e.g., A-H.1, A-H.2 or A-H.68, or as described in Table 1, or encoded by the nucleotide sequence in Table 1; or which differs at least 1 or 5 residues, but less than 40, 30, 20, or 10 residues, from a variable region of an antibody described herein.

[0437] In some embodiments, the anti-TCRβV antibody molecule, e.g., anti-TCRβ V6 (e.g., anti-TCRβ V6-5*01) antibody molecule, comprises at least one, two, three, or four antigen-binding regions, e.g., variable regions, having an amino acid sequence as set forth in Table 1, or a sequence substantially identical thereto (e.g., a sequence at least about 85%, 90%, 95%, 99% or more identical thereto, or which differs by no more than 1, 2, 5, 10, or 15 amino acid residues from the sequences shown in Table 1. In another embodiment, the anti-TCRβV antibody molecule, e.g., anti-TCRβ V6 (e.g., anti-TCRβ V6-5*01) antibody molecule includes a VH and/or VL domain encoded by a nucleic acid having a nucleotide sequence as set forth in Table 1, or a sequence substantially identical thereto (e.g., a sequence at least about 85%, 90%, 95%, 99% or more identical thereto, or which differs by no more than 3, 6, 15, 30, or 45 nucleotides from the sequences shown in Table 1.

[0438] In some embodiments, the anti-TCRβV antibody molecule, e.g., anti-TCRβ V6 (e.g., anti-TCRβ V6-5*01) antibody molecule, comprises: a VH domain comprising the amino acid sequence of SEQ ID NO: 9, an amino acid sequence at least about 85%, 90%, 95%, 99% or more identical to the amino acid sequence of SEQ ID NO: 9, or an amino acid sequence which differs by no more than 1, 2, 5, 10, or 15 amino acid residues from the amino acid sequence of SEQ ID NO. 9; and/or a VL domain comprising the amino acid sequence of SEQ ID NO: 10, an amino acid sequence at least about 85%, 90%, 95%, 99% or more identical to the amino acid sequence of SEQ ID NO: 10, or an amino acid sequence which differs by no more than 1, 2, 5, 10, or 15 amino acid residues from the amino acid sequence of SEQ ID NO: 10.

[0439] In some embodiments, the anti-TCRβV antibody molecule, e.g., anti-TCRβ V6 (e.g., anti-TCRβ V6-5*01) antibody molecule, comprises: a VH domain comprising the amino acid sequence of SEQ ID NO: 9, an amino acid sequence at least about 85%, 90%, 95%, 99% or more identical to the amino acid sequence of SEQ ID NO: 9, or an amino acid sequence which differs by no more than 1, 2, 5, 10, or 15 amino acid residues from the amino acid sequence of SEQ ID NO. 9; and/or a VL domain comprising the amino acid sequence of SEQ ID NO: 11, an amino acid sequence at least about 85%, 90%, 95%, 99% or more identical to the amino acid sequence of SEQ ID NO: 11, or an amino acid sequence which differs by no more than 1, 2, 5, 10, or 15 amino acid residues from the amino acid sequence of SEQ ID NO: 11.

[0440] In some embodiments, the anti-TCRβV antibody molecule, e.g., anti-TCRβ V6 (e.g., anti-TCRβ V6-5*01) antibody molecule is a full antibody or fragment thereof (e.g., a Fab, F(ab′)₂, Fv, single domain antibody, or a single chain Fv fragment (scFv)). In embodiments, the anti-TCRβV antibody molecule, e.g., anti-TCRβ V6 (e.g., anti-TCRβ V6-5*01) antibody molecule is a monoclonal antibody or an antibody with single specificity. In some embodiments, the anti-TCRβV antibody molecule, e.g., anti-TCRβ V6 (e.g., anti-TCRβ V6-5*01) antibody molecule, can also be a humanized, chimeric, camelid, shark, or an in vitro-generated antibody molecule. In some embodiments, the anti-TCRβV antibody molecule, e.g., anti-TCRβ V6 (e.g., anti-TCRβ V6-5*01) antibody molecule, is a humanized antibody molecule. The heavy and light chains of the anti-TCRβV antibody molecule, e.g., anti-TCRβ V6 (e.g., anti-TCRβ V6-5*01) antibody molecule, can be full-length (e.g., an antibody can include at least one, and preferably two, complete heavy chains, and at least one, and preferably two, complete light chains) or can include an antigen-binding fragment (e.g., a Fab, F(ab′)2, Fv, a single chain Fv fragment, a single domain antibody, a diabody (dAb), a bivalent antibody, or bispecific antibody or fragment thereof, a single domain variant thereof, or a camelid antibody).

[0441] In some embodiments, the anti-TCRβV antibody molecule, e.g., anti-TCRβ V6 (e.g., anti-TCRβ V6-5*01) antibody molecule, is in the form of a multispecific molecule, e.g., a bispecific molecule, e.g., as described herein.

[0442] In some embodiments, the anti-TCRβV antibody molecule, e.g., anti-TCRβ V6 (e.g., anti-TCRβ V6-5*01) antibody molecule, has a heavy chain constant region (Fc) chosen from, e.g., the heavy chain constant regions of IgG1, IgG2, IgG3, IgG4, IgM, IgA1, IgA2, IgD, and IgE. In some embodiments, the Fc region is chosen from the heavy chain constant regions of IgG1, IgG2, IgG3, and IgG4. In some embodiments, the Fc region is chosen from the heavy chain constant region of IgG1 or IgG2 (e.g., human IgG1, or IgG2). In some embodiments, the heavy chain constant region is human IgG1. In some embodiments, the Fc region comprises a Fc region variant, e.g., as described herein.

[0443] In some embodiments, the anti-TCRβV antibody molecule, e.g., anti-TCRβ V6 (e.g., anti-TCRβ V6-5*01) antibody molecule, has a light chain constant region chosen from, e.g., the light chain constant regions of kappa or lambda, preferably kappa (e.g., human kappa). In some embodiments, the constant region is altered, e.g., mutated, to modify the properties of the anti-TCRβV antibody molecule, e.g., anti-TCRβ V6 (e.g., anti-TCRβ V6-5*01) antibody molecule (e.g., to increase or decrease one or more of: Fc receptor binding, antibody glycosylation, the number of cysteine residues, effector cell function, or complement function). For example, the constant region is mutated at positions 296 (M to Y). 298 (S to T). 300 (T to E). 477 (H to K) and 478 (N to F) to alter Fc receptor binding (e.g., the mutated positions correspond to positions 132 (M to Y), 134 (S to T), 136 (T to E), 313 (H to K) and 314 (N to F) of SEQ ID NOs: 212 or 214; or positions 135 (M to Y), 137 (S to T), 139 (T to E), 316 (H to K) and 317 (N to F) of SEQ ID NOs: 215, 216, 217 or 218), e.g., relative to human IgG1.

[0444] Antibody A-H.1 comprises a heavy chain comprising the amino acid sequence of SEQ ID NO: 3278 and a light chain comprising the amino acid sequence of SEQ ID NO: 72. Antibody A-H.2 comprises a heavy chain comprising the amino acid sequence of SEQ ID NO: 3278 and a light chain comprising the amino acid sequence of SEQ ID NO: 3279. Antibody A-H.68 comprises the amino acid sequence of SEQ ID NO: 1337, or a sequence having at least 85%, 90%, 95%, 96%, 97%, 98%, 99%, 99.5%, 99.9%, or 100% sequence identity thereto. Antibody A-H.69 comprises the amino acid sequence of SEQ ID NO: 110, or a sequence having at least 85%, 90%, 95%, 96%, 97%, 98%, 99%, 99.5%, 99.9%, or 100% sequence identity thereto.

[0445] Additional exemplary humanized anti-TCRβ V6 antibodies are provided in Table 1. In some embodiments, the anti-TCRβ V6 is antibody A, e.g., humanized antibody A (antibody A-H), as provided in Table 1. In some embodiments, the anti-TCRβV antibody comprises one or more (e.g., all three) of a LC CDR1, LC CDR2, and LC CDR3 provided in Table 1; and/or one or more (e.g., all three) of a HC CDR1, HC CDR2, and HC CDR3 provided in Table 1, or a sequence with at least 85%, 90%, 95%, 96%, 97%, 98%, 99%, 99.5%, 99.9%, or 100% sequence identity thereto. In some embodiments, antibody A comprises a variable heavy chain (VH) and/or a variable light chain (VL) provided in Table 1, or a sequence with at least 85%, 90%, 95%, 96%, 97%, 98%, 99%, 99.5%, 99.9%, or 100% sequence identity thereto.

[0446] In some embodiments, the anti-TCRβV antibody molecule, e.g., anti-TCRβ V6 (e.g., anti-TCRβ V6-5*01) antibody molecule comprises a VH of A-H.1, A-H.2, A-H.3, A-H.4, A-H.5, A-H.6, A-H.7, A-H.8, A-H.9, A-H.10, A-H.11, A-H.12, A-H.13, A-H.14, A-H.15, A-H.16, A-H.17, A-H.18, A-H.19, A-H.20, A-H.21. A-H.22, A-H.23, A-H.24, A-H.25, A-H.26, A-H.27, A-H.28, A-H.29, A-H.30, A-H.31, A-H.32, A-H.33, A-H.34, A-H.35, A-H.36, A-H.37, A-H.38, A-H.39, A-H.40, A-H.41, A-H.42, A-H.43, A-H.44, A-H.45, A-H.46, A-H.47, A-H.48, A-H.49, A-H.50, A-H.51, A-H.52, A-H.53, A-H.54, A-H.55, A-H.56, A-H.57, A-H.58, A-H.59, A-H.60, A-H.61, A-H.62, A-H.63, A-H.64, A-H.65, A-H.66, A-H.67, A-H.68, A-H.69, A-H.70, A-H.71, A-H.72, A-H.73, A-H.74, A-H.75, A-H.76, A-H.77, A-H.78, A-H.79, A-H.80, A-H.81, A-H.82, A-H.83, A-H.84, or A-H.85, or a sequence with at least 80%, 85%, 90%, 95%, 96%, 97%, 98%, 99% or more identity thereto.

[0447] In some embodiments, the anti-TCRβV antibody molecule, e.g., anti-TCRβ V6 (e.g., anti-TCRβ V6-5*01) antibody molecule comprises a VL of A-H.1, A-H.2, A-H.3, A-H.4, A-H.5, A-H.6, A-H.7, A-H.8, A-H.9, A-H.10, A-H.11, A-H.12, A-H.13, A-H.14, A-H.15, A-H.16, A-H.17, A-H.18, A-H.19, A-H.20, A-H.21. A-H.22, A-H.23, A-H.24, A-H.25, A-H.26, A-H.27, A-H.28, A-H.29, A-H.30, A-H.31, A-H.32, A-H.33, A-H.34, A-H.35, A-H.36, A-H.37, A-H.38, A-H.39, A-H.40, A-H.1, A-H.42, A-H.43, A-H.44, A-H.45, A-H.46, A-H.47, A-H.48, A-H.49, A-H.50, A-H.51, A-H.52, A-H.53, A-H.54, A-H.55, A-H.56, A-H.57, A-H.58, A-H.59, A-H.60, A-H.61, A-H.62, A-H.63, A-H.64, A-H.65, A-H.66, A-H.67, A-H.68, A-H.69, A-H.70, A-H.71, A-H.72, A-H.73, A-H.74, A-H.75, A-H.76, A-H.77, A-H.78, A-H.79, A-H.80, A-H.81, A-H.82, A-H.83, A-H.84, or A-H.85, or a sequence with at least 80%, 85%, 90%, 95%, 96%, 97%, 98%, 99% or more identity thereto.

[0448] In some embodiments, the anti-TCRβV antibody molecule, e.g., anti-TCRβ V6 (e.g., anti-TCRβ V6-5*01) antibody molecule comprises a VH of A-H.1, A-H.2, A-H.3, A-H.4, A-H.5, A-H.6, A-H.7, A-H.8, A-H.9, A-H.10, A-H.11, A-H.12, A-H.13, A-H.14, A-H.15, A-H.16, A-H.17, A-H.18, A-H.19, A-H.20, A-H.21, A-H.22, A-H.23, A-H.24, A-H.25, A-H.26, A-H.27, A-H.28, A-H.29, A-H.30, A-H.31, A-H.32, A-H.33, A-H.34, A-H.35, A-H.36, A-H.37, A-H.38, A-H.39, A-H.40, A-H.1, A-H.42, A-H.43, A-H.44, A-H.45, A-H.46, A-H.47, A-H.48, A-H.49, A-H.50, A-H.51, A-H.52, A-H.53, A-H.54, A-H.55, A-H.56, A-H.57, A-H.58, A-H.59, A-H.60, A-H.61, A-H.62, A-H.63, A-H.64, A-H.65, A-H.66, A-H.67, A-H.68, A-H.69, A-H.70, A-H.71, A-H.72, A-H.73, A-H.74, A-H.75, A-H.76, A-H.77, A-H.78, A-H.79, A-H.80, A-H.81, A-H.82, A-H.83, A-H.84, or A-H.85, or a sequence with at least 80%, 85%, 90%, 95%, 96%, 97%, 98%, 99% or more identity thereto; and a VL of A-H.1, A-H.2, A-H.3, A-H.4, A-H.5, A-H.6, A-H.7, A-H.8, A-H.9, A-H.10, A-H.11, A-H.12, A-H.13, A-H.14, A-H.15, A-H.16, A-H.17, A-H.18, A-H.19, A-H.20, A-H.21, A-H.22, A-H.23, A-H.24, A-H.25, A-H.26, A-H.27, A-H.28, A-H.29, A-H.30, A-H.31, A-H.32, A-H.33, A-H.34, A-H.35, A-H.36, A-H.37, A-H.38, A-H.39, A-H.40, A-H.1, A-H.42, A-H.43, A-H.44, A-H.45, A-H.46, A-H.47, A-H.48, A-H.49, A-H.50, A-H.51, A-H.52, A-H.53, A-H.54, A-H.55, A-H.56, A-H.57, A-H.58, A-H.59, A-H.60, A-H.61, A-H.62, A-H.63, A-H.64, A-H.65, A-H.66, A-H.67, A-H.68, A-H.69, A-H.70, A-H.71, A-H.72, A-H.73, A-H.74, A-H.75, A-H.76, A-H.77, A-H.78, A-H.79, A-H.80, A-H.81, A-H.82, A-H.83, A-H.84, or A-H.85, or a sequence with at least 80%, 85%, 90%, 95%, 96%, 97%, 98%, 99% or more identity thereto.

[0449] Exemplary anti-TCRβV antibody molecules and the corresponding TCRβV subfamilies recognized by said anti-TCRβV antibody molecules are disclosed in Table 10A.

[0450] The various TCRβV subfamilies and/or subfamily members can be expressed at different levels in individuals, e.g., healthy individuals, as disclosed in Kitaura K. et al (2016), BMC Immunology vol 17:38, the entire contents of which are hereby incorporated by reference. For example, TCRβ V6-5 is represented in approximately 3-6% healthy donors.

[0451] The representation of various TCRβV subfamilies and/or subfamily members can also be different in cancer cells. For example, TCRβV is present in about 3-6% of tumor infiltrating T cells irrespective of tumor type (see Li B, et al., Nature Genetics, 2016, vol: 48 (7): 725-32 the entire contents of which are hereby incorporated by references). Li et al., also disclose that TCRβ V6-5 is present at a high frequency in tumor cells.

### Anti-TCRβ V6 Antibodies

[0452] In one aspect, provided herein is an anti-TCRβV antibody molecule that binds to human TCRβ V6, e.g., a TCRβ V6 subfamily comprising. TCRβ V6-4*01, TCRβ V6-4*02, TCRβ V6-9*01, TCRβ V6-8*01. TCRβ V6-5*01, TCRβ V6-6*02, TCRβ V6-6*01, TCRβ V6-2*01, TCRβ V6-3*01 or TCRβ V6-1*01. In some embodiments the TCRβ V6 subfamily comprises TCRβ V6-5*01 or a variant thereof. In some embodiments. TCRβ V6 comprises TCRβ V6-4*01, or a variant thereof. In some embodiments, TCRβ V6 comprises TCRβ V6-4*02, or a variant thereof. In some embodiments, TCRβ V6 comprises TCRβ V6-9*01, or a variant thereof. In some embodiments, TCRβ V6 comprises TCRβ V6-8*01, or a variant thereof. In some embodiments. TCRβ V6 comprises TCRβ V6-5*01, or a variant thereof. In some embodiments, TCRβ V6 comprises TCRβ V6-6*02, or a variant thereof. In some embodiments. TCRβ V6 comprises TCRβ V6-6*01, or a variant thereof. In some embodiments, TCRβ V6 comprises TCRβ V6-2*01, or a variant thereof. In some embodiments. TCRβ V6 comprises TCRβ V6-3*01, or a variant thereof. In some embodiments. TCRβ V6 comprises TCRβ V6-1*01, or a variant thereof.

[0453] In some embodiments, TCRβ V6-5*01 is encoded by the nucleic acid sequence of SEQ ID NO: 43, or a sequence having 85%, 90%, 95%, 99% or more identity thereof. In some embodiments, TCRβ V6-5*01 comprises the amino acid sequence of SEQ ID NO: 44, or an amino acid sequence having 85%, 90%, 95%. 99% or more identity thereof.

[0454] In some embodiments, the anti-TCRβV antibody molecule, e.g., anti-TCRβ V6 (e.g., anti-TCRβ V6-5*01) antibody molecule, is a non-murine antibody molecule, e.g., a human or humanized antibody molecule. In some embodiments, the anti-TCRβV antibody molecule, e.g., anti-TCRβ V6 (e.g., anti-TCRβ V6-5*01) antibody molecule is a human antibody molecule. In some embodiments, the anti-TCRβV antibody molecule. e.g., anti-TCRβ V6 (e.g., anti-TCRβ V6-5*01) antibody molecule is a humanized antibody molecule.

[0455] In some embodiments, the anti-TCRβV antibody molecule, e.g., anti-TCRβ V6 (e.g., anti-TCRβ V6-5*01) antibody molecule, is isolated or recombinant.

[0456] In some embodiments, the anti-TCRβV antibody molecule, e.g., anti-TCRβ V6 (e.g., anti-TCRβ V6-5*01) antibody molecule, comprises at least one antigen-binding region, e.g., a variable region or an antigen-binding fragment thereof, from an antibody described herein, e.g., an antibody chosen from any one of A-H.1 to A-H.85, e.g., A-H.1, A-H.2 or A-H.68, or an antibody described in Table 1, or encoded by a nucleotide sequence in Table 1, or a sequence substantially identical (e.g., at least 80%, 85%, 90%, 92%, 95%, 97%, 98%, 99% or higher identical) to any of the aforesaid sequences.

[0457] In some embodiments, the anti-TCRβV antibody molecule, e.g., anti-TCRβ V6 (e.g., anti-TCRβ V6-5*01) antibody molecule, comprises at least one, two, three or four variable regions from an antibody described herein, e.g., an antibody chosen from any one of A-H.1 to A-H.85, e.g., A-H.1, A-H.2 or A-H.68, or an antibody described in Table 1, or encoded by a nucleotide sequence in Table 1, or a sequence substantially identical (e.g., at least 80%, 85%, 90%, 92%, 95%, 97%, 98%, 99% or higher identical) to any of the aforesaid sequences.

[0458] In some embodiments, the anti-TCRβV antibody molecule, e.g., anti-TCRβ V6 (e.g., anti-TCRβ V6-5*01) antibody molecule, comprises at least one or two heavy chain variable regions from an antibody described herein, e.g., an antibody chosen from any one of A-H.1 to A-H.85, e.g., A-H.1, A-H.2 or A-H.68, or an antibody molecule described in Table 1, or encoded by a nucleotide sequence in Table 1, or a sequence substantially identical (e.g., at least 80%, 85%, 90%, 92%, 95%, 97%, 98%, 99% or higher identical) to any of the aforesaid sequences.

[0459] In some embodiments, the anti-TCRβV antibody molecule comprises a heavy chain variable region (VH) having a consensus sequence of SEQ ID NO: 231 or 3290.

-Consensus VH
SEQ ID NO: 231
QVQLVQSGAEVKKPGSSVKVSCKASGH/T/G/YD/T/SFH/R/D/K/
TL/D/K/T/NW/F/T/I/Y/GYIHWVRQAPGQGLEWMGR/WV/I/FF/
S/YA/PGSGN/ST/V/Y/IK/RYNEKFKGRVTITADTSTSTAYMELSSL
RSEDTAVYYCAG/VSY/IYSY/AD/GVLDYWGQGTTVTVSS
-Consensus VH
SEQ ID NO: 3290
QVQLVQSGAEVKKPGSSVKVSCKASGX₁X₂FX₃X₄X₅YIHWVRQAPGQGLE
WMGX₆X₇X₈X₉GSGX₁₀X₁₁X₁₂YNEKFKGRVTITADTSTSTAYMELSSLRSE
DTAVYYCAX₁₃SX₁₄YSX₁₅X₁₆VLDYWGQGTTVTVSS

where-in: X1 is H or Tor G or Y: X2 is D or Tor S; X3 is H or R or D or K or T: X4 is L or D or K or Tor N; X5 is W or F or T or I or Y or G; X6 is R or W: X7 is V or I or F; X8 is F or S or Y; X9 is A or P; X10 is Nor S: X11 is Tor V or Y or I: X12 is K or R; X13 is G or V: X14 is Y or I: X15 is Y or A; and X16 is D or G.

[0460] In some embodiments, the anti-TCRβV antibody molecule, e.g., anti-TCRβ V6 (e.g., anti-TCRβ V6-5*01) antibody molecule, comprises at least one or two light chain variable regions from an antibody described herein, e.g., an antibody chosen from any one of A-H.1 to A-H.85, e.g., A-H.1, A-H.2 or A-H.68, or an antibody described in Table 1, or encoded by a nucleotide sequence in Table 1, or a sequence substantially identical (e.g., at least 80%, 85%, 90%, 92%, 95%, 97%, 98%, 99% or higher identical) to any of the aforesaid sequences.

[0461] In some embodiments, the anti-TCRβV antibody molecule comprises a light chain variable region (VL) having a consensus sequence of SEQ ID NO: 230 or 3289.

-Consensus VL
SEQ ID NO: 230
DIQMTQSPSFLSASVGDRVTITCKASQNVG/E/A/DN/DR/KVAWY/HQ
QKPGKAPKALIYSSSHRYK/SGVPSRFSGSGSGTEFTLTISSLQPEDFA
TYFCQQFKSYPLTFGQGTKLEIK

[0462] SEQ ID NO: 3289-Consensus VL DIQMTQSPSFLSASVGDRVTITCKASQNVX₁X₂X₃VAWX₄QQKPGKAPKALIYSSSHRYX₅GVPSRFSGS GSGTEFTLTISSLQPEDFATYFCQQFKSYPLTFGQGTKLEIK, wherein X1 is G, E, A or D; X2 is N or D; X3 is R or K: X4 is Y or H; and X5 is K or S

[0463] In some embodiments, the anti-TCRβV antibody molecule, e.g., anti-TCRβ V6 (e.g., anti-TCRβ V6-5*01) antibody molecule, comprises a heavy chain constant region for an IgG4, e.g., a human IgG4. In still another embodiment, the anti-TCRβV antibody molecule, e.g., anti-TCRβ V6 (e.g., anti-TCRβ V6-5*01) antibody molecule includes a heavy chain constant region for an IgG1, e.g., a human IgG1. In some embodiments, the heavy chain constant region comprises an amino sequence set forth in Table 3, 21, or 22, or a sequence substantially identical (e.g., at least 80%, 85%, 90%, 92%, 95%, 97%, 98%, 99% or higher identical) thereto.

[0464] In some embodiments, the anti-TCRβV antibody molecule, e.g., anti-TCRβ V6 (e.g., anti-TCRβ V6-5*01) antibody molecule, includes a kappa light chain constant region, e.g., a human kappa light chain constant region. In some embodiments, the light chain constant region comprises an amino sequence set forth in Table 3, 21, or 22, or a sequence substantially identical (e.g., at least 80%, 85%, 90%, 92%, 95%, 97%, 98%, 99% or higher identical) thereto.

[0465] In some embodiments, the anti-TCRβV antibody molecule, e.g., anti-TCRβ V6 (e.g., anti-TCRβ V6-5*01) antibody molecule, includes at least one, two, or three complementarity determining regions (CDRs) from a heavy chain variable region (VH) of an antibody described herein, e.g., an antibody chosen from any one of A-H.1 to A-H.85, e.g., A-H.1, A-H.2 or A-H.68, or an antibody described in Table 1, or encoded by a nucleotide sequence in Table 1, or a sequence substantially identical (e.g., at least 80%, 85%, 90%, 92%. 95%, 97%, 98%, 99% or higher identical) to any of the aforesaid sequences.

[0466] In some embodiments, the anti-TCRβV antibody molecule, e.g., anti-TCRβ V6 (e.g., anti-TCRβ V6-5*01) antibody molecule, includes at least one, two, or three CDRs (or collectively all of the CDRs) from a heavy chain variable region comprising an amino acid sequence shown in Table 1, or encoded by a nucleotide sequence shown in Table 1. In some embodiments, one or more of the CDRs (or collectively all of the CDRs) have one, two, three, four, five, six or more changes, e.g., amino acid substitutions or deletions, relative to the amino acid sequence shown in Table 1, or encoded by a nucleotide sequence shown in Table 1.

[0467] In some embodiments, the anti-TCRβV antibody molecule, e.g., anti-TCRβ V6 (e.g., anti-TCRβ V6-5*01) antibody molecule, includes at least one, two, or three complementarity determining regions (CDRs) from a light chain variable region of an antibody described herein, e.g., an antibody chosen from any one of A-H.1 to A-H.85, e.g., A-H.1, A-H.2 or A-H.68, or an antibody described in Table 1, or encoded by a nucleotide sequence in Table 1, or a sequence substantially identical (e.g., at least 80%, 85%, 90%, 92%. 95%, 97%, 98%, 99% or higher identical) to any of the aforesaid sequences.

[0468] In some embodiments, the anti-TCRβV antibody molecule, e.g., anti-TCRβ V6 (e.g., anti-TCRβ V6-5*01) antibody molecule, includes at least one, two, or three CDRs (or collectively all of the CDRs) from a light chain variable region comprising an amino acid sequence shown in Table 1, or encoded by a nucleotide sequence shown in Table 1. In some embodiments, one or more of the CDRs (or collectively all of the CDRs) have one, two, three, four, five, six or more changes, e.g., amino acid substitutions or deletions, relative to the amino acid sequence shown in Table 1, or encoded by a nucleotide sequence shown in Table 1.

[0469] In some embodiments, the anti-TCRβV antibody molecule, e.g., anti-TCRβ V6 (e.g., anti-TCRβ V6-5*01) antibody molecule, includes at least one, two, three, four, five or six CDRs (or collectively all of the CDRs) from a heavy and light chain variable region comprising an amino acid sequence shown in Table 1, or encoded by a nucleotide sequence shown in Table 1. In some embodiments, one or more of the CDRs (or collectively all of the CDRs) have one, two, three, four, five, six or more changes, e.g., amino acid substitutions or deletions, relative to the amino acid sequence shown in Table 1, or encoded by a nucleotide sequence shown in Table 1.

[0470] In some embodiments, the anti-TCRβV antibody molecule, e.g., anti-TCRβ V6 (e.g., anti-TCRβ V6-5*01) antibody molecule, molecule includes all six CDRs from an antibody described herein, e.g., an antibody chosen from any one of A-H.1 to A-H.85, e.g., A-H.1, A-H.2 or A-H.68, or an antibody described in Table 1, or encoded by a nucleotide sequence in Table 1, or closely related CDRs, e.g., CDRs which are identical or which have at least one amino acid alteration, but not more than two, three or four alterations (e.g., substitutions, deletions, or insertions, e.g., conservative substitutions). In some embodiments, the anti-TCRβV antibody molecule, e.g., anti-TCRβ V6 (e.g., anti-TCRβ V6-5*01) antibody molecule, may include any CDR described herein.

[0471] In some embodiments, the anti-TCRβV antibody molecule, e.g., anti-TCRβ V6 (e.g., anti-TCRβ V6-5*01) antibody molecule includes at least one, two, or three CDRs according to Kabat et al. (e.g., at least one, two, or three CDRs according to the Kabat definition as set out in Table 1) from a heavy chain variable region of an antibody described herein, e.g., an antibody chosen from any one of A-H.1 to A-H.85, e.g., A-H.1, A-H.2 or A-H.68, or an antibody described in Table 1, or a sequence substantially identical (e.g., at least 80%. 85%, 90%, 92%, 95%, 97%, 98%, 99% or higher identical) to any of the aforesaid sequences; or which have at least one amino acid alteration, but not more than two, three or four alterations (e.g., substitutions, deletions, or insertions, e.g., conservative substitutions) relative to one, two, or three CDRs according to Kabat et al, shown in Table 1.

[0472] In some embodiments, the anti-TCRβV antibody molecule, e.g., anti-TCRβ V6 (e.g., anti-TCRβ V6-5*01) antibody molecule includes at least one, two, or three CDRs according to Kabat et al. (e.g., at least one, two, or three CDRs according to the Kabat definition as set out in Table 1) from a light chain variable region of an antibody described herein, e.g., an antibody chosen from any one of A-H.1 to A-H.85, e.g., A-H.1, A-H.2 or A-H.68, or an antibody described in Table 1, or a sequence substantially identical (e.g., at least 80%, 85%, 90%, 92%, 95%, 97%, 98%, 99% or higher identical) to any of the aforesaid sequences; or which have at least one amino acid alteration, but not more than two, three or four alterations (e.g., substitutions, deletions, or insertions, e.g., conservative substitutions) relative to one, two, or three CDRs according to Kabat et al, shown in Table 1.

[0473] In some embodiments, the anti-TCRβV antibody molecule, e.g., anti-TCRβ V6 (e.g., anti-TCRβ V6-5*01) antibody molecule, includes at least one, two, three, four, five, or six CDRs according to Kabat et al. (e.g., at least one, two, three, four, five, or six CDRs according to the Kabat definition as set out in Table 1) from the heavy and light chain variable regions of an antibody described herein, e.g., an antibody chosen from any one of A-H.1 to A-H.85, e.g., A-H.1, A-H.2 or A-H.68, or an antibody described in Table 1, or encoded by a nucleotide sequence in Table 1; or a sequence substantially identical (e.g., at least 80%, 85%, 90%, 92%. 95%, 97%, 98%, 99% or higher identical) to any of the aforesaid sequences; or which have at least one amino acid alteration, but not more than two, three or four alterations (e.g., substitutions, deletions, or insertions. e.g., conservative substitutions) relative to one, two, three, four, five, or six CDRs according to Kabat et al. shown in Table 1.

[0474] In some embodiments, the anti-TCRβV antibody molecule, e.g., anti-TCRβ V6 (e.g., anti-TCRβ V6-5*01) antibody molecule, includes all six CDRs according to Kabat et al. (e.g., all six CDRs according to the Kabat definition as set out in Table 1) from the heavy and light chain variable regions of an antibody described herein, e.g., an antibody chosen from any one of A-H.1 to A-H.85, e.g., A-H.1, A-H.2 or A-H.68, or an antibody described in Table 1, or encoded by a nucleotide sequence in Table 1; or a sequence substantially identical (e.g., at least 80%, 85%, 90%, 92%, 95%, 97%, 98%, 99% or higher identical) to any of the aforesaid sequences; or which have at least one amino acid alteration, but not more than two, three or four alterations (e.g., substitutions, deletions, or insertions, e.g., conservative substitutions) relative to all six CDRs according to Kabat et al, shown in Table 1. In some embodiments, the anti-TCRβV antibody molecule. e.g., anti-TCRβ V6 (e.g., anti-TCRβ V6-5*01) antibody molecule, may include any CDR described herein.

[0475] In some embodiments, the anti-TCRβV antibody molecule, e.g., anti-TCRβ V6 (e.g., anti-TCRβ V6-5*01) antibody molecule, includes at least one, two, or three hypervariable loops that have the same canonical structures as the corresponding hypervariable loop of an antibody described herein, e.g., an antibody chosen from chosen from any one of A-H.1 to A-H.85, e.g., A-H.1, A-H.2 or A-H.68, e.g., the same canonical structures as at least loop 1 and/or loop 2 of the heavy and/or light chain variable domains of an antibody described herein. See, e.g., Chothia et al., (1992) J. Mol. Biol. 227:799-817; Tomlinson et al. (1992) J. Mol. Biol. 227:776-798 for descriptions of hypervariable loop canonical structures. These structures can be determined by inspection of the tables described in these references.

[0476] In some embodiments, the anti-TCRβV antibody molecule, e.g., anti-TCRβ V6 (e.g., anti-TCRβ V6-5*01) antibody molecule includes at least one, two, or three CDRs according to Chothia et al. (e.g., at least one, two, or three CDRs according to the Chothia definition as set out in Table 1) from a heavy chain variable region of an antibody described herein, e.g., an antibody chosen from any one of A-H.1 to A-H.85, e.g., A-H.1, A-H.2 or A-H.68, or as described in Table 1, or a sequence substantially identical (e.g., at least 80%, 85%, 90%, 92%, 95%, 97%, 98%, 99% or higher identical) to any of the aforesaid sequences; or which have at least one amino acid alteration, but not more than two, three or four alterations (e.g., substitutions, deletions, or insertions, e.g., conservative substitutions) relative to one, two, or three CDRs according to Chothia et al, shown in Table 1.

[0477] In some embodiments, the anti-TCRβV antibody molecule, e.g., anti-TCRβ V6 (e.g., anti-TCRβ V6-5*01) antibody molecule includes at least one, two, or three CDRs according to Chothia et al. (e.g., at least one, two, or three CDRs according to the Chothia definition as set out in Table 1) from a light chain variable region of an antibody described herein, e.g., an antibody chosen from any one of A-H.1 to A-H.85, e.g., A-H.1, A-H.2 or A-H.68, or an antibody described in Table 1, or a sequence substantially identical (e.g., at least 80%, 85%, 90%, 92%, 95%, 97%, 98%, 99% or higher identical) to any of the aforesaid sequences; or which have at least one amino acid alteration, but not more than two, three or four alterations (e.g., substitutions, deletions, or insertions, e.g., conservative substitutions) relative to one, two, or three CDRs according to Chothia et al, shown in Table 1.

[0478] In some embodiments, the anti-TCRβV antibody molecule, e.g., anti-TCRβ V6 (e.g., anti-TCRβ V6-5*01) antibody molecule, includes at least one, two, three, four, five, or six CDRs according to Chothia et al (e.g., at least one, two, three, four, five, or six CDRs according to the Chothia definition as set out in Table 1) from the heavy and light chain variable regions of an antibody described herein, e.g., an antibody chosen from any one of A-H.1 to A-H.85, e.g., A-H.1, A-H.2 or A-H.68, or an antibody described in Table 1, or encoded by the nucleotide sequence in Table 1; or a sequence substantially identical (e.g., at least 80%, 85%, 90%, 92%, 95%, 97%, 98%, 99% or higher identical) to any of the aforesaid sequences; or which have at least one amino acid alteration, but not more than two, three or four alterations (e.g., substitutions, deletions, or insertions, e.g., conservative substitutions) relative to one, two, three, four, five, or six CDRs according to Chothia et al, shown in Table 1.

[0479] In some embodiments, the anti-TCRβV antibody molecule, e.g., anti-TCRβ V6 (e.g., anti-TCRβ V6-5*01) antibody molecule, includes all six CDRs according to Chothia et al. (e.g., all six CDRs according to the Chothia definition as set out in Table 1) from the heavy and light chain variable regions of an antibody described herein, e.g., an antibody chosen from any one of A-H.1 to A-H.85, e.g., A-H.1, A-H.2 or A-H.68, or an antibody described in Table 1, or encoded by a nucleotide sequence in Table 1; or a sequence substantially identical (e.g., at least 80%, 85%, 90%, 92%, 95%, 97%, 98%, 99% or higher identical) to any of the aforesaid sequences; or which have at least one amino acid alteration, but not more than two, three or four alterations (e.g., substitutions, deletions, or insertions, e.g., conservative substitutions) relative to all six CDRs according to Chothia et al shown in Table 1. In some embodiments, the anti-TCRβV antibody molecule, e.g., anti-TCRβ V6 (e.g., anti-TCRβ V6-5*01) antibody molecule, may include any CDR described herein.

[0480] In some embodiments, the anti-TCRβV antibody molecule, e.g., anti-TCRβ V6 (e.g., anti-TCRβ V6-5*01) antibody molecule, molecule includes a combination of CDRs or hypervariable loops defined according to Kabat et al., Chothia et al., by ImMunoGeneTics (IMGT) numbering system or as described in Table 1.

[0481] In some embodiments, the anti-TCRβV antibody molecule, e.g., anti-TCRβ V6 (e.g., anti-TCRβ V6-5*01) antibody molecule, can contain any combination of CDRs or hypervariable loops according to the Kabat and Chothia definitions, or by ImMunoGeneTics (IMGT) numbering system.

[0482] In some embodiments, a combined CDR as set out in Table 1 is a CDR that comprises a Kabat CDR and a Chothia CDR.

[0483] In some embodiments, the anti-TCRβV antibody molecule, e.g., anti-TCRβ V6 (e.g., anti-TCRβ V6-5*01) antibody molecule, molecule includes a combination of CDRs or hypervariable loops identified as combined CDRs in Table 1. In some embodiments, the anti-TCRβV antibody molecule, e.g., anti-TCRβ V6 (e.g., anti-TCRβ V6-5*01) antibody molecule, can contain any combination of CDRs or hypervariable loops according the “combined” CDRs are described in Table 1.

[0484] In some embodiments, e.g., an embodiment comprising a variable region, a CDR (e.g., a combined CDR. Chothia CDR or Kabat CDR, or by ImMunoGene Tics (IMGT) numbering system), or other sequence referred to herein, e.g., in Table 1, the antibody molecule is a monospecific antibody molecule, a bispecific antibody molecule, a bivalent antibody molecule, a biparatopic antibody molecule, or an antibody molecule that comprises an antigen binding fragment of an antibody, e.g., a half antibody or antigen binding fragment of a half antibody. In certain embodiments the antibody molecule comprises a multispecific molecule, e.g., a bispecific molecule, e.g., as described herein.

[0485] In some embodiments, the anti-TCRβV antibody molecule, e.g., anti-TCRβ V6 (e.g., anti-TCRβ V6-5*01) antibody molecule includes: (i) one, two or all of a light chain complementarity determining region 1 (LC CDR1), a light chain complementarity determining region 2 (LC CDR2), and a light chain complementarity determining region 3 (LC CDR3) of SEQ ID NO: 2, SEQ ID NO: 10 or SEQ ID NO: 11, and/or (ii) one, two or all of a heavy chain complementarity determining region 1 (HC CDR1), heavy chain complementarity determining region 2 (HC CDR2), and a heavy chain complementarity determining region 3 (HC CDR3) of SEQ ID NO: 1 or SEQ ID NO: 9.

[0486] In some embodiments, the anti-TCRβV antibody molecule, e.g., anti-TCRβ V6 (e.g., anti-TCRβ V6-5*01) antibody molecule comprises a LC CDR1, LC CDR2, and LC CDR3 of SEQ ID NO: 2, and a HC CDR1. HC CDR2, and HC CDR3 of SEQ ID NO: 1.

[0487] In some embodiments the anti-TCRβV antibody molecule, e.g., anti-TCRβ V6 (e.g., anti-TCRβ V6-5*01) antibody molecule comprises a LC CDR1, LC CDR2, and LC CDR3 of SEQ ID NO: 10, and a HC CDR1, HC CDR2, and HC CDR3 of SEQ ID NO: 9.

[0488] In some embodiments, the anti-TCRβV antibody molecule, e.g., anti-TCRβ V6 (e.g., anti-TCRβ V6-5*01) antibody molecule comprises a LC CDR1, LC CDR2, and LC CDR3 of SEQ ID NO: 11, and a HC CDR1, HC CDR2, and HC CDR3 of SEQ ID NO: 9.

[0489] In some embodiments, the anti-TCRβV antibody molecule, e.g., anti-TCRβ V6 (e.g., anti-TCRβ V6-5*01) antibody molecule comprises: (i) a LC CDR1 amino acid sequence of SEQ ID NO: 6, a LC CDR2 amino acid sequence of SEQ ID NO: 7, or a LC CDR3 amino acid sequence of SEQ ID NO: 8; and/or (ii) a HC CDR1 amino acid sequence of SEQ ID NO: 3, a HC CDR2 amino acid sequence of SEQ ID NO: 4, or a HC CDR3 amino acid sequence of SEQ ID NO: 5.

[0490] In some embodiments, the anti-TCRβV antibody molecule, e.g., anti-TCRβ V6 (e.g., anti-TCRβ V6-5*01) antibody molecule comprises: (i) a light chain variable region (VL) comprising a LC CDR1 amino acid sequence of SEQ ID NO: 6, a LC CDR2 amino acid sequence of SEQ ID NO: 7, or a LC CDR3 amino acid sequence of SEQ ID NO. 8; and/or (ii) a heavy chain variable region (VH) comprising a HC CDR1 amino acid sequence of SEQ ID NO: 3, a HC CDR2 amino acid sequence of SEQ ID NO: 4, or a HC CDR3 amino acid sequence of SEQ ID NO: 5.

[0491] In some embodiments, the anti-TCRβV antibody molecule, e.g., anti-TCRβ V6 (e.g., anti-TCRβ V6-5*01) antibody molecule comprises: (i) a LC CDR1 amino acid sequence of SEQ ID NO: 51, a LC CDR2 amino acid sequence of SEQ ID NO: 52, or a LC CDR3 amino acid sequence of SEQ ID NO: 53; and/or (ii) a HC CDR1 amino acid sequence of SEQ ID NO: 45, a HC CDR2 amino acid sequence of SEQ ID NO: 46, or a HC CDR3 amino acid sequence of SEQ ID NO: 47.

[0492] In some embodiments, the anti-TCRβV antibody molecule, e.g., anti-TCRβ V6 (e.g., anti-TCRβ V6-5*01) antibody molecule comprises: (i) a light chain variable region (VL) comprising a LC CDR1 amino acid sequence of SEQ ID NO: 51, a LC CDR2 amino acid sequence of SEQ ID NO: 52, or a LC CDR3 amino acid sequence of SEQ ID NO: 53; and/or (ii) a heavy chain variable region (VH) comprising a HC CDR1 amino acid sequence of SEQ ID NO: 45, a HC CDR2 amino acid sequence of SEQ ID NO: 46, or a HC CDR3 amino acid sequence of SEQ ID NO: 47.

[0493] In some embodiments, the anti-TCRβV antibody molecule, e.g., anti-TCRβ V6 (e.g., anti-TCRβ V6-5*01) antibody molecule comprises: (i) a LC CDR1 amino acid sequence of SEQ ID NO: 54, a LC CDR2 amino acid sequence of SEQ ID NO: 55, or a LC CDR3 amino acid sequence of SEQ ID NO: 56; and/or (ii) a HC CDR1 amino acid sequence of SEQ ID NO: 48, a HC CDR2 amino acid sequence of SEQ ID NO: 49, or a HC CDR3 amino acid sequence of SEQ ID NO: 50.

[0494] In some embodiments, the anti-TCRβV antibody molecule, e.g., anti-TCRβ V6 (e.g., anti-TCRβ V6-5*01) antibody molecule comprises: (i) a light chain variable region (VL) comprising a LC CDR1 amino acid sequence of SEQ ID NO: 54, a LC CDR2 amino acid sequence of SEQ ID NO: 55, or a LC CDR3 amino acid sequence of SEQ ID NO: 56; and/or (ii) a heavy chain variable region (VH) comprising a HC CDR1 amino acid sequence of SEQ ID NO: 48, a HC CDR2 amino acid sequence of SEQ ID NO: 49, or a HC CDR3 amino acid sequence of SEQ ID NO: 50.

[0495] In some embodiments, the anti-TCRβV antibody molecule, e.g., anti-TCRβ V6 (e.g., anti-TCRβ V6-5*01) antibody molecule comprises a VH and/or a VL of an antibody described in Table 1, or a sequence with at least 80%, 85%, 90%, 95%, 96%, 97%, 98%, 99% or more identity thereto.

[0496] In some embodiments, the anti-TCRβV antibody molecule, e.g., anti-TCRβ V6 (e.g., anti-TCRβ V6-5*01) antibody molecule comprises a VH and a VL of an antibody described in Table 1, or a sequence with at least 80%, 85%, 90%, 95%, 96%, 97%, 98%, 99% or more identity thereto.

[0497] In some embodiments, an anti-TCRVb antibody as described herein has an antigen binding domain having a VL having a consensus sequence of SEQ ID NO: 230, wherein position 30 is G, E, A or D; position 31 is N or D; position 32 is R or K; position 36 is Y or H; and/or position 56 is K or S.

[0498] In some embodiments, an anti-TCRVb antibody as described herein has an antigen binding domain having a VH having a consensus sequence of SEQ ID NO: 231, wherein: position 27 is H or T or G or Y; position 28 is D or T or S; position 30 is H or R or D or K or T; position 31 is L or D or K or T or N; position 32 is W or F or T or I or Y or G; position 49 is R or W, position 50 is V or I or F; position 51 is F or S or Y; position 52 is A or P; position 56 is N or S; position 57 is T or V or Y or I; position 58 is K or R; position 97 is G or V; position 99 is Y or I; position 102 is Y or A; and/or position 103 is D or G.

### Anti-TCRβ V12 Antibodies

[0499] In one aspect, provided herein is an anti-TCRβV antibody molecule that binds to human TCRβ V12, e.g., a TCRβ V12 subfamily comprising: TCRβ V12-4*01, TCRβ V12-3*01 or TCRβ V12-5*01. In some embodiments the TCRβ V12 subfamily comprises TCRβ V12-4*01. In some embodiments the TCRβ V12 subfamily comprises TCRβ V12-3*01.

[0500] In some embodiments, the anti-TCRβV antibody molecule, e.g., anti-TCRβ V12 antibody molecule, is a non-murine antibody molecule, e.g., a human or humanized antibody molecule. In some embodiments, the anti-TCRβV antibody molecule, e.g., anti-TCRβ V12 antibody molecule is a human antibody molecule. In some embodiments, the anti-TCRβV antibody molecule, e.g., anti-TCRβ V12 antibody molecule is a humanized antibody molecule.

[0501] In some embodiments, the anti-TCRβV antibody molecule, e.g., anti-TCRβ V12 antibody molecule, is isolated or recombinant.

[0502] In some embodiments, the anti-TCRβV antibody molecule, e.g., anti-TCRβ V12 antibody molecule, comprises at least one antigen-binding region, e.g., a variable region or an antigen-binding fragment thereof, from an antibody described herein, e.g., an antibody described in Table 2, or encoded by a nucleotide sequence in Table 2, or a sequence substantially identical (e.g., at least 80%, 85%, 90%, 92%, 95%, 97%, 98%, 99% or higher identical) to any of the aforesaid sequences.

[0503] In some embodiments, the anti-TCRβV antibody molecule, e.g., anti-TCRβ V12 antibody molecule, comprises at least one, two, three or four variable regions from an antibody described herein, e.g., an antibody as described in Table 2, or encoded by a nucleotide sequence in Table 2, or a sequence substantially identical (e.g., at least 80%, 85%, 90%, 92%, 95%, 97%, 98%, 99% or higher identical) to any of the aforesaid sequences.

[0504] In some embodiments, the anti-TCRβV antibody molecule, e.g., anti-TCRβ V12 antibody molecule, comprises at least one or two heavy chain variable regions from an antibody described herein, e.g., an antibody as described in Table 2, or encoded by a nucleotide sequence in Table 2, or a sequence substantially identical (e.g., at least 80%, 85%, 90%, 92%, 95%, 97%, 98%, 99% or higher identical) to any of the aforesaid sequences.

[0505] In some embodiments, the anti-TCRβV antibody molecule, e.g., anti-TCRβ V12 antibody molecule, comprises at least one or two light chain variable regions from an antibody described herein, e.g., an antibody as described in Table 2, or encoded by a nucleotide sequence in Table 2, or a sequence substantially identical (e.g., at least 80%, 85%, 90%, 92%, 95%, 97%, 98%, 99% or higher identical) to any of the aforesaid sequences.

[0506] In some embodiments, the anti-TCRβV antibody molecule, e.g., anti-TCRβ V12 antibody molecule, comprises a heavy chain constant region for an IgG4, e.g., a human IgG4. In still another embodiment, the anti-TCRβV antibody molecule, e.g., anti-TCRβ V12 antibody molecule, includes a heavy chain constant region for an IgG1, e.g., a human IgG1. In some embodiments, the heavy chain constant region comprises an amino sequence set forth in Table 3, 21, or 22, or a sequence substantially identical (e.g., at least 80%, 85%, 90%, 92%, 95%, 97%, 98%, 99% or higher identical) thereto.

[0507] In some embodiments, the anti-TCRβV antibody molecule, e.g., anti-TCRβ V12 antibody molecule, includes a kappa light chain constant region, e.g., a human kappa light chain constant region. In some embodiments, the light chain constant region comprises an amino sequence set forth in Table 3, 21, or 22, or a sequence substantially identical (e.g., at least 80%, 85%, 90%, 92%, 95%, 97%, 98%, 99% or higher identical) thereto.

[0508] In some embodiments, the anti-TCRβV antibody molecule, e.g., anti-TCRβ V12 antibody molecule, includes at least one, two, or three complementarity determining regions (CDRs) from a heavy chain variable region of an antibody described herein, e.g., an antibody as described in Table 2, or encoded by the nucleotide sequence in Table 2, or a sequence substantially identical (e.g., at least 80%, 85%, 90%, 92%, 95%, 97%, 98%, 99% or higher identical) to any of the aforesaid sequences.

[0509] In some embodiments, the anti-TCRβV antibody molecule, e.g., anti-TCRβ V12 antibody molecule, includes at least one, two, or three CDRs (or collectively all of the CDRs) from a heavy chain variable region comprising an amino acid sequence shown in Table 2, or encoded by a nucleotide sequence shown in Table 2. In some embodiments, one or more of the CDRs (or collectively all of the CDRs) have one, two, three, four, five, six or more changes, e.g., amino acid substitutions or deletions, relative to the amino acid sequence shown in Table 2, or encoded by a nucleotide sequence shown in Table 2.

[0510] In some embodiments, the anti-TCRβV antibody molecule, e.g., anti-TCRβ V12 antibody molecule, includes at least one, two, or three complementarity determining regions (CDRs) from a light chain variable region of an antibody described herein, e.g., an antibody as described in Table 2, or encoded by the nucleotide sequence in Table 2, or a sequence substantially identical (e.g., at least 80%, 85%, 90%, 92%, 95%, 97%, 98%, 99% or higher identical) to any of the aforesaid sequences.

[0511] In some embodiments, the anti-TCRβV antibody molecule, e.g., anti-TCRβ V12 antibody molecule, includes at least one, two, or three CDRs (or collectively all of the CDRs) from a light chain variable region comprising an amino acid sequence shown in Table 2, or encoded by a nucleotide sequence shown in Table 2. In some embodiments, one or more of the CDRs (or collectively all of the CDRs) have one, two, three, four, five, six or more changes, e.g., amino acid substitutions or deletions, relative to the amino acid sequence shown in Table 2, or encoded by a nucleotide sequence shown in Table 2.

[0512] In some embodiments, the anti-TCRβV antibody molecule, e.g., anti-TCRβ V12 antibody molecule, includes at least one, two, three, four, five or six CDRs (or collectively all of the CDRs) from a heavy and light chain variable region comprising an amino acid sequence shown in Table 2, or encoded by a nucleotide sequence shown in Table 2. In some embodiments, one or more of the CDRs (or collectively all of the CDRs) have one, two, three, four, five, six or more changes, e.g., amino acid substitutions or deletions, relative to the amino acid sequence shown in Table 2, or encoded by a nucleotide sequence shown in Table 2.

[0513] In some embodiments, the anti-TCRβV antibody molecule, e.g., anti-TCRβ V12 antibody molecule, molecule includes all six CDRs from an antibody described herein, e.g., an antibody as described in Table 2, or encoded by the nucleotide sequence in Table 2, or closely related CDRs, e.g., CDRs which are identical or which have at least one amino acid alteration, but not more than two, three or four alterations (e.g., substitutions, deletions, or insertions, e.g., conservative substitutions). In some embodiments, the anti-TCRβV antibody molecule, e.g., anti-TCRβ V12 antibody molecule, may include any CDR described herein.

[0514] In some embodiments, the anti-TCRβV antibody molecule, e.g., anti-TCRβ V12 antibody molecule includes at least one, two, or three CDRs according to Kabat et al. (e.g., at least one, two, or three CDRs according to the Kabat definition as set out in Table 2) from a heavy chain variable region of an antibody described herein, e.g., an antibody chosen as described in Table 2, or a sequence substantially identical (e.g., at least 80%, 85%, 90%, 92%, 95%, 97%, 98%, 99% or higher identical) to any of the aforesaid sequences; or which have at least one amino acid alteration, but not more than two, three or four alterations (e.g., substitutions, deletions, or insertions, e.g., conservative substitutions) relative to one, two, or three CDRs according to Kabat et al, shown in Table 2.

[0515] In some embodiments, the anti-TCRβV antibody molecule, e.g., anti-TCRβ V12 antibody molecule includes at least one, two, or three CDRs according to Kabat et al. (e.g., at least one, two, or three CDRs according to the Kabat definition as set out in Table 2) from a light chain variable region of an antibody described herein, e.g., an antibody as described in Table 2, or a sequence substantially identical (e.g., at least 80%, 85%, 90%, 92%, 95%, 97%, 98%, 99% or higher identical) to any of the aforesaid sequences; or which have at least one amino acid alteration, but not more than two, three or four alterations (e.g., substitutions, deletions, or insertions, e.g., conservative substitutions) relative to one, two, or three CDRs according to Kabat et al, shown in Table 2.

[0516] In some embodiments, the anti-TCRβV antibody molecule, e.g., anti-TCRβ V12 antibody molecule includes at least one, two, three, four, five, or six CDRs according to Kabat et al. (e.g., at least one, two, three, four, five, or six CDRs according to the Kabat definition as set out in Table 2) from the heavy and light chain variable regions of an antibody described herein, e.g., an antibody as described in Table 2, or encoded by the nucleotide sequence in Table 2; or a sequence substantially identical (e.g., at least 80%, 85%, 90%, 92%. 95%, 97%, 98%, 99% or higher identical) to any of the aforesaid sequences; or which have at least one amino acid alteration, but not more than two, three or four alterations (e.g., substitutions, deletions, or insertions. e.g., conservative substitutions) relative to one, two, three, four, five, or six CDRs according to Kabat et al. shown in Table 2.

[0517] In some embodiments, the anti-TCRβV antibody molecule, e.g., anti-TCRβ V12 antibody molecule includes all six CDRs according to Kabat et al. (e.g., all six CDRs according to the Kabat definition as set out in Table 2) from the heavy and light chain variable regions of an antibody described herein, e.g., an antibody as described in Table 2, or encoded by the nucleotide sequence in Table 2; or encoded by the nucleotide sequence in Table 2; or a sequence substantially identical (e.g., at least 80%, 85%, 90%, 92%, 95%, 97%, 98%, 99% or higher identical) to any of the aforesaid sequences; or which have at least one amino acid alteration, but not more than two, three or four alterations (e.g., substitutions, deletions, or insertions, e.g., conservative substitutions) relative to all six CDRs according to Kabat et al, shown in Table 2. In some embodiments, the anti-TCRβV antibody molecule, e.g., anti-TCRβ V12 antibody molecule may include any CDR described herein.

[0518] In some embodiments, the anti-TCRβV antibody molecule, e.g., anti-TCRβ V12 antibody molecule includes at least one, two, or three hypervariable loops that have the same canonical structures as the corresponding hypervariable loop of an antibody described herein, e.g., an antibody described in Table 2, e.g., the same canonical structures as at least loop 1 and/or loop 2 of the heavy and/or light chain variable domains of an antibody described herein. See, e.g., Chothia et al. (1992) J. Mol. Biol. 227:799-817; Tomlinson et al., (1992) J. Mol. Biol. 227:776-798 for descriptions of hypervariable loop canonical structures. These structures can be determined by inspection of the tables described in these references.

[0519] In some embodiments, the anti-TCRβV antibody molecule, e.g., anti-TCRβ V12 antibody molecule includes at least one, two, or three CDRs according to Chothia et al. (e.g., at least one, two, or three CDRs according to the Chothia definition as set out in Table 2) from a heavy chain variable region of an antibody described herein, e.g., an antibody chosen as described in Table 2, or a sequence substantially identical (e.g., at least 80%, 85%, 90%, 92%, 95%, 97%, 98%, 99% or higher identical) to any of the aforesaid sequences; or which have at least one amino acid alteration, but not more than two, three or four alterations (e.g., substitutions, deletions, or insertions, e.g., conservative substitutions) relative to one, two, or three CDRs according to Chothia et al, shown in Table 2.

[0520] In some embodiments, the anti-TCRβV antibody molecule, e.g., anti-TCRβ V12 antibody molecule includes at least one, two, or three CDRs according to Chothia et al. (e.g., at least one, two, or three CDRs according to the Chothia definition as set out in Table 2) from a light chain variable region of an antibody described herein, e.g., an antibody as described in Table 2, or a sequence substantially identical (e.g., at least 80%, 85%, 90%, 92%, 95%, 97%, 98%, 99% or higher identical) to any of the aforesaid sequences; or which have at least one amino acid alteration, but not more than two, three or four alterations (e.g., substitutions, deletions, or insertions, e.g., conservative substitutions) relative to one, two, or three CDRs according to Chothia et al, shown in Table 2.

[0521] In some embodiments, the anti-TCRβV antibody molecule, e.g., anti-TCRβ V12 antibody molecule includes at least one, two, three, four, five, or six CDRs according to Chothia et al. (e.g., at least one, two, three, four, five, or six CDRs according to the Chothia definition as set out in Table 2) from the heavy and light chain variable regions of an antibody described herein, e.g., an antibody as described in Table 2, or encoded by the nucleotide sequence in Table 2; or a sequence substantially identical (e.g., at least 80%, 85%, 90%, 92%, 95%, 97%, 98%, 99% or higher identical) to any of the aforesaid sequences; or which have at least one amino acid alteration, but not more than two, three or four alterations (e.g., substitutions, deletions, or insertions, e.g., conservative substitutions) relative to one, two, three, four, five, or six CDRs according to Chothia et al, shown in Table 2.

[0522] In some embodiments, the anti-TCRβV antibody molecule, e.g., anti-TCRβ V12 antibody molecule includes all six CDRs according to Chothia et al. (e.g., all six CDRs according to the Chothia definition as set out in Table 2) from the heavy and light chain variable regions of an antibody described herein, e.g., an antibody as described in Table 2, or encoded by the nucleotide sequence in Table 2; or encoded by the nucleotide sequence in Table 2; or a sequence substantially identical (e.g., at least 80%, 85%, 90%, 92%, 95%, 97%, 98%, 99% or higher identical) to any of the aforesaid sequences; or which have at least one amino acid alteration, but not more than two, three or four alterations (e.g., substitutions, deletions, or insertions. e.g., conservative substitutions) relative to all six CDRs according to Chothia et al, shown in Table 2. In some embodiments, the anti-TCRβV antibody molecule, e.g., anti-TCRβ V12 antibody molecule may include any CDR described herein.

[0523] In some embodiments, the anti-TCRβV antibody molecule, e.g., anti-TCRβ V12 antibody molecule includes at least one, two, or three CDRs according to a combined CDR (e.g., at least one, two, or three CDRs according to the combined CDR definition as set out in Table 2) from a heavy chain variable region of an antibody described herein, e.g., an antibody chosen as described in Table 2, or a sequence substantially identical (e.g., at least 80%, 85%, 90%, 92%, 95%, 97%, 98%, 99% or higher identical) to any of the aforesaid sequences; or which have at least one amino acid alteration, but not more than two, three or four alterations (e.g., substitutions, deletions, or insertions, e.g., conservative substitutions) relative to one, two, or three CDRs according to combined CDR shown in Table 2.

[0524] In some embodiments, the anti-TCRβV antibody molecule, e.g., anti-TCRβ V12 antibody molecule includes at least one, two, or three CDRs according to a combined CDR (e.g., at least one, two, or three CDRs according to the combined CDR definition as set out in Table 2) from a light chain variable region of an antibody described herein, e.g., an antibody as described in Table 2, or a sequence substantially identical (e.g., at least 80%, 85%, 90%, 92%, 95%, 97%, 98%, 99% or higher identical) to any of the aforesaid sequences; or which have at least one amino acid alteration, but not more than two, three or four alterations (e.g., substitutions, deletions, or insertions, e.g., conservative substitutions) relative to one, two, or three CDRs according to a combined CDR shown in Table 2.

[0525] In some embodiments, the anti-TCRβV antibody molecule, e.g., anti-TCRβ V12 antibody molecule includes at least one, two, three, four, five, or six CDRs according to a combined CDR. (e.g., at least one, two, three, four, five, or six CDRs according to the combined CDR definition as set out in Table 2) from the heavy and light chain variable regions of an antibody described herein, e.g., an antibody as described in Table 2, or encoded by the nucleotide sequence in Table 2; or a sequence substantially identical (e.g., at least 80%, 85%, 90%, 92%, 95%, 97%, 98%, 99% or higher identical) to any of the aforesaid sequences; or which have at least one amino acid alteration, but not more than two, three or four alterations (e.g., substitutions, deletions, or insertions, e.g., conservative substitutions) relative to one, two, three, four, five, or six CDRs according to a combined CDR shown in Table 2.

[0526] In some embodiments, the anti-TCRβV antibody molecule, e.g., anti-TCRβ V12 antibody molecule includes all six CDRs according to a combined CDR (e.g., all six CDRs according to the combined CDR definition as set out in Table 2) from the heavy and light chain variable regions of an antibody described herein, e.g., an antibody as described in Table 2, or encoded by the nucleotide sequence in Table 2; or encoded by the nucleotide sequence in Table 2, or a sequence substantially identical (e.g., at least 80%, 85%, 90%, 92%, 95%, 97%, 98%, 99% or higher identical) to any of the aforesaid sequences; or which have at least one amino acid alteration, but not more than two, three or four alterations (e.g., substitutions, deletions, or insertions, e.g., conservative substitutions) relative to all six CDRs according to a combined CDR shown in Table 2. In some embodiments, the anti-TCRβV antibody molecule, e.g., anti-TCRβ V12 antibody molecule may include any CDR described herein.

[0527] In some embodiments, a combined CDR as set out in Table 1 is a CDR that comprises a Kabat CDR and a Chothia CDR or by ImMunoGeneTics (IMGT) numbering system.

[0528] In some embodiments, the anti-TCRβV antibody molecule, e e.g., anti-TCRβ V12 antibody molecule, molecule includes a combination of CDRs or hypervariable loops identified as combined CDRs in Table 1. In some embodiments, the anti-TCRβV antibody molecule, e.g., anti-TCRβ V12 antibody molecule, can contain any combination of CDRs or hypervariable loops according the “combined” CDRs are described in Table 1.

[0529] In some embodiments, the anti-TCRβV antibody molecule, e.g., anti-TCRβ V12 antibody molecule includes a combination of CDRs or hypervariable loops defined according to the Kabat et al, and Chothia et al., by ImMunoGeneTics (IMGT) numbering system, or as described in Table 1.

[0530] In some embodiments, the anti-TCRβV antibody molecule, e.g., anti-TCRβ V12 antibody molecule can contain any combination of CDRs or hypervariable loops according to the Kabat and Chothia definitions, or by ImMunoGeneTics (IMGT) numbering system.

[0531] In some embodiments, e.g., an embodiment comprising a variable region, a CDR (e.g., a combined CDR, Chothia CDR or Kabat CDR, or by ImMunoGeneTies (IMGT) numbering system), or other sequence referred to herein, e.g., in Table 2, the antibody molecule is a monospecific antibody molecule, a bispecific antibody molecule, a bivalent antibody molecule, a biparatopic antibody molecule, or an antibody molecule that comprises an antigen binding fragment of an antibody, e.g., a half antibody or antigen binding fragment of a half antibody. In certain embodiments the antibody molecule comprises a multispecific molecule, e.g., a bispecific molecule, e.g., as described herein.

[0532] In some embodiments, the anti-TCRβV antibody molecule, e.g., anti-TCRβ V12 antibody molecule includes. (i) one, two or all of a light chain complementarity determining region 1 (LC CDR1), a light chain complementarity determining region 2 (LC CDR2), and a light chain complementarity determining region 3 (LC CDR3) of SEQ ID NO: 16, SEQ ID NO: 26, SEQ ID NO: 27, SEQ ID NO: 28, SEQ ID NO: 29 or SEQ ID NO: 30, and/or (ii) one, two or all of a heavy chain complementarity determining region 1 (HC CDR1), heavy chain complementarity determining region 2 (HC CDR2), and a heavy chain complementarity determining region 3 (HC CDR3) of SEQ ID NO: 15, SEQ ID NO: 23, SEQ ID NO: 24 or SEQ ID NO: 25.

[0533] In some embodiments, the anti-TCRβV antibody molecule, e.g., anti-TCRβ V12 antibody molecule comprises: (i) a LC CDR1 amino acid sequence of SEQ ID NO: 20, a LC CDR2 amino acid sequence of SEQ ID NO: 21, or a LC CDR3 amino acid sequence of SEQ ID NO: 22; and/or (ii) a HC CDR1 amino acid sequence of SEQ ID NO: 17, a HC CDR2 amino acid sequence of SEQ ID NO: 18, or a HC CDR3 amino acid sequence of SEQ ID NO: 19.

[0534] In some embodiments, the anti-TCRβV antibody molecule, e.g., anti-TCRβ V12 antibody molecule comprises: (1) a light chain variable region (VL) comprising a LC CDR1 amino acid sequence of SEQ ID NO: 20, a LC CDR2 amino acid sequence of SEQ ID NO: 21, and a LC CDR3 amino acid sequence of SEQ ID NO: 2; and/or (ii) a heavy chain variable region (VH) comprising a HC CDR1 amino acid sequence of SEQ ID NO: 17, a HC CDR2 amino acid sequence of SEQ ID NO: 18, and a HC CDR3 amino acid sequence of SEQ ID NO: 19.

[0535] In some embodiments, the anti-TCRβV antibody molecule, e.g., anti-TCRβ V12 antibody molecule comprises: (i) a LC CDR1 amino acid sequence of SEQ ID NO: 63, a LC CDR2 amino acid sequence of SEQ ID NO: 64, or a LC CDR3 amino acid sequence of SEQ ID NO: 65; and/or (ii) a HC CDR1 amino acid sequence of SEQ ID NO. 57, a HC CDR2 amino acid sequence of SEQ ID NO: 58, or a HC CDR3 amino acid sequence of SEQ ID NO: 59.

[0536] In some embodiments, the anti-TCRβV antibody molecule, e.g., anti-TCRβ V12 antibody molecule comprises: (i) a light chain variable region (VL) comprising a LC CDR1 amino acid sequence of SEQ ID NO: 63, a LC CDR2 amino acid sequence of SEQ ID NO: 64, or a LC CDR3 amino acid sequence of SEQ ID NO: 65; and/or (ii) a heavy chain variable region (VH) comprising a HC CDR1 amino acid sequence of SEQ ID NO: 57, a HC CDR2 amino acid sequence of SEQ ID NO: 58, or a HC CDR3 amino acid sequence of SEQ ID NO: 59.

[0537] In some embodiments, the anti-TCRβV antibody molecule, e.g., anti-TCRβ V12 antibody molecule comprises: (i) a LC CDR1 amino acid sequence of SEQ ID NO: 66, a LC CDR2 amino acid sequence of SEQ ID NO: 67, or a LC CDR3 amino acid sequence of SEQ ID NO: 68; and/or (ii) a HC CDR1 amino acid sequence of SEQ ID NO: 60, a HC CDR2 amino acid sequence of SEQ ID NO: 61, or a HC CDR3 amino acid sequence of SEQ ID NO: 62.

[0538] In some embodiments, the anti-TCRβV antibody molecule, e.g., anti-TCRβ V12 antibody molecule comprises: (i) a light chain variable region (VL) comprising a LC CDR1 amino acid sequence of SEQ ID NO: 63, a LC CDR2 amino acid sequence of SEQ ID NO: 64, or a LC CDR3 amino acid sequence of SEQ ID NO: 65; and/or (ii) a heavy chain variable region (VH) comprising a HC CDR1 amino acid sequence of SEQ ID NO: 57, a HC CDR2 amino acid sequence of SEQ ID NO. 58, or a HC CDR3 amino acid sequence of SEQ ID NO: 59.

[0539] In some embodiments, the light or the heavy chain variable framework (e.g., the region encompassing at least FR1, FR2, FR3, and optionally FR4) of the anti-TCRβV antibody molecule, e.g., anti-TCRβ V12 antibody molecule can be chosen from: (a) a light or heavy chain variable framework including at least 80%, 85%, 87% 90%, 92%, 93%, 95%, 97%, 98%, or 100% of the amino acid residues from a human light or heavy chain variable framework, e.g., a light or heavy chain variable framework residue from a human mature antibody, a human germline sequence, or a human consensus sequence; (b) a light or heavy chain variable framework including from 20% to 80%, 40% to 60%, 60% to 90%, or 70% to 95% of the amino acid residues from a human light or heavy chain variable framework, e.g., a light or heavy chain variable framework residue from a human mature antibody, a human germline sequence, or a human consensus sequence: (c) a non-human framework (e.g., a rodent framework); or (d) a non-human framework that has been modified, e.g., to remove antigenic or cytotoxic determinants, e.g., deimmunized, or partially humanized. In some embodiments, the light or heavy chain variable framework region (particularly FR1, FR2 and/or FR3) includes a light or heavy chain variable framework sequence at least 70, 75, 80, 85, 87, 88, 90, 92, 94, 95, 96, 97, 98, 99% identical or identical to the frameworks of a VL or VH segment of a human germline gene.

[0540] In some embodiments, the anti-TCRβV antibody molecule, e.g., anti-TCRβ V12 antibody molecule, comprises a heavy chain variable domain having at least one, two, three, four, five, six, seven, ten, fifteen, twenty or more changes, e.g., amino acid substitutions or deletions, from an amino acid sequence described in Table 2. e.g., the amino acid sequence of the FR region in the entire variable region, e.g., shown in FIGS. 3A and 3B, or in SEQ ID NOs: 23-25.

[0541] Alternatively, or in combination with the heavy chain substitutions described herein the anti-TCRβV antibody molecule, e.g., anti-TCRβ V12 antibody molecule comprises a light chain variable domain having at least one, two, three, four, five, six, seven, ten, fifteen, twenty or more amino acid changes, e.g., amino acid substitutions or deletions, from an amino acid sequence of an antibody described herein e.g., the amino acid sequence of the FR region in the entire variable region, e.g., shown in FIGS. 3A and 3B, or in SEQ ID NOs: 26-30.

[0542] In some embodiments, the anti-TCRβV antibody molecule, e.g., anti-TCRβ V12 antibody molecule includes one, two, three, or four heavy chain framework regions shown in FIG. 3A, or a sequence substantially identical thereto.

[0543] In some embodiments, the anti-TCRβV antibody molecule, e.g., anti-TCRβ V12 antibody molecule includes one, two, three, or four light chain framework regions shown in FIG. 3B, or a sequence substantially identical thereto. In some embodiments, the anti-TCRβV antibody molecule, e.g., anti-TCRβ V12 antibody molecule comprises the light chain framework region 1 e.g., as shown in FIG. 3B. In some embodiments, the anti-TCRβV antibody molecule, e.g., anti-TCRβ V12 antibody molecule comprises the light chain framework region 2 e.g., as shown in FIG. 3B. In some embodiments, the anti-TCRβV antibody molecule, e.g., anti-TCRβV12 antibody molecule comprises the light chain framework region 3, e.g., as shown in FIG. 3B. In some embodiments, the anti-TCRβV antibody molecule, e.g., anti-TCRβ V12 antibody molecule comprises the light chain framework region 4, e.g., as shown in FIG. 3B.

[0544] In some embodiments, the anti-TCRβV antibody molecule, e.g., anti-TCRβ V12 antibody molecule comprises a light chain comprising a framework region, e.g., framework region 1 (FR1), comprising a change, e.g., a substitution (e.g., a conservative substitution) at one or more, e.g., all, position as described herein according to Kabat numbering. In some embodiments, FR1 comprises an Aspartic Acid at position 1, e.g., a substitution at position 1 according to Kabat numbering, e.g., an Alanine to Aspartic Acid substitution. In some embodiments, FR1 comprises an Asparagine at position 2, e.g., a substitution at position 2 according to Kabat numbering, e.g., an Isoleucine to Asparagine substitution, Serine to Asparagine substitution or Tyrosine to Asparagine substitution. In some embodiments, FR1 comprises a Leucine at position 4, e.g., a substitution at position 4 according to Kabat numbering, e.g., a Methionine to Leucine substitution.

[0545] In some embodiments, the anti-TCRβV antibody molecule, e.g., anti-TCRβ V12 antibody molecule comprises a light chain comprising a framework region, e.g., framework region 1 (FR1), comprising a substitution at position 1 according to Kabat numbering, e.g., an Alanine to Aspartic Acid substitution, a substitution at position 2 according to Kabat numbering, e.g., an Isoleucine to Asparagine substitution. Serine to Asparagine substitution or Tyrosine to Asparagine substitution, and a substitution at position 4 according to Kabat numbering, e.g., a Methionine to Leucine substitution. In some embodiments, the anti-TCRβV antibody molecule, e.g., anti-TCRβ V12 antibody molecule comprises a light chain comprising a framework region, e.g., framework region 1 (FR1), comprising a substitution at position 1 according to Kabat numbering. e.g., an Alanine to Aspartic Acid substitution, and a substitution at position 2 according to Kabat numbering. e.g., an Isoleucine to Asparagine substitution. Serine to Asparagine substitution or Tyrosine to Asparagine substitution. In some embodiments, the anti-TCRβV antibody molecule, e.g., anti-TCRβ V12 antibody molecule comprises a light chain comprising a framework region, e.g., framework region 1 (FR1), comprising a substitution at position 1 according to Kabat numbering, e.g., an Alanine to Aspartic Acid substitution, and a substitution at position 4 according to Kabat numbering, e.g., a Methionine to Leucine substitution. In some embodiments, the anti-TCRβV antibody molecule, e.g., anti-TCRβ V12 antibody molecule comprises a light chain comprising a framework region, e.g., framework region 1 (FR1), comprising a substitution at position 2 according to Kabat numbering, e.g., an Isoleucine to Asparagine substitution, Serine to Asparagine substitution or Tyrosine to Asparagine substitution, and a substitution at position 4 according to Kabat numbering, e.g., a Methionine to Leucine substitution. In some embodiments, the substitution is relative to a human germline light chain framework region sequence.

[0546] In some embodiments, the anti-TCRβV antibody molecule, e.g., anti-TCRβ V12 antibody molecule comprises a light chain comprising a framework region, e.g., framework region 3 (FR3), comprising a change, e.g., a substitution (e.g., a conservative substitution) at one or more, e.g., all, position as described herein according to Kabat numbering. In some embodiments, FR3 comprises a Glycine at position 66, e.g., a substitution at position 66 according to Kabat numbering, e.g., a Lysine to Glycine substitution, or a Serine to Glycine substitution. In some embodiments, FR3 comprises an Asparagine at position 69, e.g., a substitution at position 69 according to Kabat numbering, e.g., a Tyrosine to Asparagine substitution. In some embodiments, FR3 comprises a Tyrosine at position 71, e.g., a substitution at position 71 according to Kabat numbering, e.g., a Phenylalanine to Tyrosine substitution, or an Alanine to Tyrosine substitution.

[0547] In some embodiments, the anti-TCRβV antibody molecule, e.g., anti-TCRβ V12 antibody molecule comprises a light chain comprising a framework region, e.g., framework region 3 (FR3), comprising a substitution at position 66 according to Kabat numbering, e.g., a Lysine to Glycine substitution, or a Serine to Glycine substitution, and a substitution at position 69 according to Kabat numbering, e.g., a Tyrosine to Asparagine substitution. In some embodiments, the anti-TCRβV antibody molecule, e.g., anti-TCRβ V12 antibody molecule comprises a light chain comprising a framework region, e.g., framework region 3 (FR3), comprising a substitution at position 66 according to Kabat numbering, e.g., Lysine to Glycine substitution, or a Serine to Glycine substitution, and a substitution at position 71 according to Kabat numbering, e.g., a Phenylalanine to Tyrosine substitution, or an Alanine to Tyrosine substitution. In some embodiments, the anti-TCRβV antibody molecule, e.g., anti-TCRβ V12 antibody molecule comprises a light chain comprising a framework region, e.g., framework region 3 (FR3), comprising a substitution at position 69 according to Kabat numbering, e.g., a Tyrosine to Asparagine substitution and a substitution at position 71 according to Kabat numbering, e.g., a Phenylalanine to Tyrosine substitution, or an Alanine to Tyrosine substitution. In some embodiments, the anti-TCRβV antibody molecule, e.g., anti-TCRβ V12 antibody molecule comprises a light chain comprising a framework region, e.g., framework region 3 (FR3), comprising a substitution at position 66 according to Kabat numbering, e.g., a Lysine to Glycine substitution, or a Serine to Glycine substitution, a substitution at position 69 according to Kabat numbering, e.g., a Tyrosine to Asparagine substitution and a substitution at position 71 according to Kabat numbering, e.g., a Phenylalanine to Tyrosine substitution, or an Alanine to Tyrosine substitution. In some embodiments, the substitution is relative to a human germline light chain framework region sequence.

[0548] In some embodiments, the anti-TCRβV antibody molecule, e.g., anti-TCRβ V12 antibody molecule comprises a light chain comprising: a framework region 1 (FR1) comprising a substitution at position 2 according to Kabat numbering, e.g., a Isoleucine to Asparagine substitution; and a framework region 3 (FR3), comprising a substitution at position 69 according to Kabat numbering, e.g., a Threonine to Asparagine substitution and a substitution at position 71 according to Kabat numbering, e.g., a Phenylalanine to Tyrosine substitution, e.g., as shown in the amino acid sequence of SEQ ID NO: 26. In some embodiments, the substitution is relative to a human germline light chain framework region sequence.

[0549] In some embodiments, the anti-TCRβV antibody molecule, e.g., anti-TCRβ V12 antibody molecule comprises a light chain comprising. (a) a framework region 1 (FR1) comprising a substitution at position 1 according to Kabat numbering, e.g., a Alanine to Aspartic Acid substitution, and a substitution at position 2 according to Kabat numbering, e.g., a Isoleucine to Asparagine substitution; and (b) a framework region 3 (FR3), comprising a substitution at position 69 according to Kabat numbering, e.g., a Threonine to Asparagine substitution and a substitution at position 71 according to Kabat numbering, e.g., a Phenylalanine to Tyrosine substitution, e.g., as shown in the amino acid sequence of SEQ ID NO: 27 In some embodiments, the substitution is relative to a human germline light chain framework region sequence.

[0550] In some embodiments, the anti-TCRβV antibody molecule, e.g., anti-TCRβ V12 antibody molecule comprises a light chain comprising: (a) a framework region 1 (FR1) comprising a substitution at position 2 according to Kabat numbering, e.g., a Serine to Asparagine substitution; and a substitution at position 4 according to Kabat numbering, e.g., a Methionine to Leucine substitution; and (b) a framework region 3 (FR3), comprising a substitution at position 69 according to Kabat numbering, e.g., a Threonine to Asparagine substitution and a substitution at position 71 according to Kabat numbering, e.g., a Phenylalanine to Tyrosine substitution, e.g., as shown in the amino acid sequence of SEQ ID NO: 28 In some embodiments, the substitution is relative to a human germline light chain framework region sequence.

[0551] In some embodiments, the anti-TCRβV antibody molecule, e.g., anti-TCRβ V12 antibody molecule comprises a light chain comprising: (a) a framework region 1 (FR1) comprising a substitution at position 2 according to Kabat numbering, e.g., a Serine to Asparagine substitution, and (b) a framework region 3 (FR3) comprising a substitution at position 66 according to Kabat numbering, e.g., a Lysine to Glycine substitution; a substitution at position 69 according to Kabat numbering, e.g., a Threonine to Asparagine substitution; and a substitution at position 71 according to Kabat numbering, e.g., a Alanine to Tyrosine substitution, e.g., as shown in the amino acid sequence of SEQ ID NO: 29. In some embodiments, the substitution is relative to a human germline light chain framework region sequence.

[0552] In some embodiments, the anti-TCRβV antibody molecule, e.g., anti-TCRβ V12 antibody molecule comprises a light chain comprising: (a) a framework region 1 (FR1) comprising a substitution at position 2 according to Kabat numbering, e.g., a Tyrosine to Asparagine substitution; and (b) a framework region 3 (FR3) comprising a substitution at position 66 according to Kabat numbering, e.g., a Serine to Glycine substitution; a substitution at position 69 according to Kabat numbering, e.g., a Threonine to Asparagine substitution; and a substitution at position 71 according to Kabat numbering, e.g., a Alanine to Tyrosine substitution, e.g., as shown in the amino acid sequence of SEQ ID NO: 29. In some embodiments, the substitution is relative to a human germline light chain framework region sequence.

[0553] In some embodiments, the anti-TCRβV antibody molecule, e.g., anti-TCRβ V12 antibody molecule comprises a light chain variable domain comprising: (a) a framework region 1 (FR1) comprising a change, e.g., a substitution (e.g., a conservative substitution) at one or more (e.g., all) positions as described herein according to Kabat numbering, and (b) a framework region 3 (FR3) comprising a change, e.g., a substitution (e.g., a conservative substitution) at one or more (e.g., all) position as described herein according to Kabat numbering. In some embodiments, the substitution is relative to a human germline light chain framework region sequence.

[0554] In some embodiments, the anti-TCRβV antibody molecule, e.g., anti-TCRβ V12 antibody molecule comprises the heavy chain framework region 1, e.g., as shown in FIG. 3A. In some embodiments, the anti-TCRβV antibody molecule, e.g., anti-TCRβ V12 antibody molecule comprises the heavy chain framework region 2, e.g., as shown in FIG. 3A. In some embodiments, the anti-TCRβV antibody molecule, e.g., anti-TCRβ V12 antibody molecule comprises the heavy chain framework region 3, e.g., as shown in FIG. 3A. In some embodiments, the anti-TCRβV antibody molecule, e.g., anti-TCRβ V12 antibody molecule comprises the heavy chain framework region 4, e.g., as shown in FIG. 3A. In some embodiments, the anti-TCRβV antibody molecule, e.g., anti-TCRβ V12 antibody molecule comprises the heavy chain framework regions 1-4, e.g., SEQ ID NOS: 20-23, or as shown in FIG. 3A. In some embodiments, the anti-TCRβV antibody molecule, e.g., anti-TCRβ V12 antibody molecule comprises the light chain framework regions 1-4, e.g., SEQ ID NOs: 26-30, or as shown in FIG. 3B.

[0555] In some embodiments, the anti-TCRβV antibody molecule, e.g., anti-TCRβ V12 antibody molecule comprises the heavy chain framework regions 1-4, e.g., SEQ ID NOs: 23-25; and the light chain framework regions 1-4, e.g., SEQ ID NOs: 26-30, or as shown in FIGS. 3A and 3B.

[0556] In some embodiments, the heavy or light chain variable domain, or both, of, the anti-TCRβV antibody molecule, e.g., anti-TCRβ V12 antibody molecule includes an amino acid sequence, which is substantially identical to an amino acid as described herein, e.g., at least 80%, 85%, 90%, 92%, 95%, 97%, 98%, 99% or higher identical to a variable region of an antibody described herein, e.g., an antibody as described in Table 2, or encoded by the nucleotide sequence in Table 2; or which differs at least 1 or 5 residues, but less than 40, 30, 20, or 10 residues, from a variable region of an antibody described herein.

[0557] In some embodiments, the anti-TCRβV antibody molecule, e.g., anti-TCRβ V12 antibody molecule comprises at least one, two, three, or four antigen-binding regions, e.g., variable regions, having an amino acid sequence as set forth in Table 2, or a sequence substantially identical thereto (e.g., a sequence at least about 85%, 90%, 95%, 99% or more identical thereto, or which differs by no more than 1, 2, 5, 10, or 15 amino acid residues from the sequences shown in Table 2. In another embodiment, the anti-TCRβV antibody molecule, e.g., anti-TCRβ V12 antibody molecule includes a VH and/or VL domain encoded by a nucleic acid having a nucleotide sequence as set forth in Table 2, or a sequence substantially identical thereto (e.g., a sequence at least about 85%, 90%, 95%, 99% or more identical thereto, or which differs by no more than 3, 6, 15, 30, or 45 nucleotides from the sequences shown in Table 2.

[0558] In some embodiments, the anti-TCRβV antibody molecule, e.g., anti-TCRβ V12 antibody molecule comprises: a VH domain comprising an amino acid sequence chosen from the amino acid sequence of SEQ ID NO: 23, SEQ ID NO:24 or SEQ ID NO:25, an amino acid sequence at least about 85%, 90%, 95%, 99% or more identical to the amino acid sequence SEQ ID NO: 23, SEQ ID NO:24 or SEQ ID NO:25, or an amino acid sequence which differs by no more than 1, 2, 5, 10, or 15 amino acid residues from the amino acid sequence of SEQ ID NO: 23, SEQ ID NO:24 or SEQ ID NO:25; and/or a VL domain comprising an amino acid sequence chosen from the amino acid sequence of SEQ ID NO: 26, SEQ ID NO: 27, SEQ ID NO: 28, SEQ ID NO: 29 or SEQ ID NO: 30, an amino acid sequence at least about 85%, 90%, 95%, 99% or more identical to the amino acid sequence of SEQ ID NO: 26, SEQ ID NO: 27, SEQ ID NO: 28, SEQ ID NO: 29 or SEQ ID NO: 30, or an amino acid sequence which differs by no more than 1, 2, 5, 10, or 15 amino acid residues from the amino acid sequence of SEQ ID NO: 26, SEQ ID NO: 27, SEQ ID NO: 28, SEQ ID NO: 29 or SEQ ID NO: 30. In some embodiments, the anti-TCRβV antibody molecule, e.g., anti-TCRβ V12 antibody molecule comprises: a VH domain comprising the amino acid sequence of SEQ ID NO: 23, an amino acid sequence at least about 85%, 90%, 95%, 99% or more identical to the amino acid sequence SEQ ID NO: 23, or an amino acid sequence which differs by no more than 1, 2, 5, 10, or 15 amino acid residues from the amino acid sequence of SEQ ID NO: 23; and a VL domain comprising the amino acid sequence of SEQ ID NO: 26, an amino acid sequence at least about 85%, 90%, 95%, 99% or more identical to the amino acid sequence SEQ ID NO: 26, or an amino acid sequence which differs by no more than 1, 2, 5, 10, or 15 amino acid residues from the amino acid sequence of SEQ ID NO: 26.

[0559] In some embodiments, the anti-TCRβV antibody molecule, e.g., anti-TCRβ V12 antibody molecule comprises: a VH domain comprising the amino acid sequence of SEQ ID NO: 23, an amino acid sequence at least about 85%, 90%, 95%, 99% or more identical to the amino acid sequence SEQ ID NO: 23, or an amino acid sequence which differs by no more than 1, 2, 5, 10, or 15 amino acid residues from the amino acid sequence of SEQ ID NO. 23; and a VL domain comprising the amino acid sequence of SEQ ID NO: 27, an amino acid sequence at least about 85%, 90%, 95%, 99% or more identical to the amino acid sequence SEQ ID NO: 27, or an amino acid sequence which differs by no more than 1, 2, 5, 10, or 15 amino acid residues from the amino acid sequence of SEQ ID NO: 27.

[0560] In some embodiments, the anti-TCRβV antibody molecule, e.g., anti-TCRβ V12 antibody molecule comprises: a VH domain comprising the amino acid sequence of SEQ ID NO: 23, an amino acid sequence at least about 85%, 90%, 95%, 99% or more identical to the amino acid sequence SEQ ID NO: 23, or an amino acid sequence which differs by no more than 1, 2, 5, 10, or 15 amino acid residues from the amino acid sequence of SEQ ID NO. 23; and a VL domain comprising the amino acid sequence of SEQ ID NO: 28, an amino acid sequence at least about 85%, 90%, 95%, 99% or more identical to the amino acid sequence SEQ ID NO: 28, or an amino acid sequence which differs by no more than 1, 2, 5, 10, or 15 amino acid residues from the amino acid sequence of SEQ ID NO: 28.

[0561] In some embodiments, the anti-TCRβV antibody molecule, e.g., anti-TCRβ V12 antibody molecule comprises: a VH domain comprising the amino acid sequence of SEQ ID NO: 23, an amino acid sequence at least about 85%, 90%, 95%, 99% or more identical to the amino acid sequence SEQ ID NO: 23, or an amino acid sequence which differs by no more than 1, 2, 5, 10, or 15 amino acid residues from the amino acid sequence of SEQ ID NO: 23; and a VL domain comprising the amino acid sequence of SEQ ID NO: 29, an amino acid sequence at least about 85%, 90%, 95%, 99% or more identical to the amino acid sequence SEQ ID NO: 29, or an amino acid sequence which differs by no more than 1, 2, 5, 10, or 15 amino acid residues from the amino acid sequence of SEQ ID NO: 29.

[0562] In some embodiments, the anti-TCRβV antibody molecule, e.g., anti-TCRβ V12 antibody molecule comprises: a VH domain comprising the amino acid sequence of SEQ ID NO: 23, an amino acid sequence at least about 85%, 90%, 95%, 99% or more identical to the amino acid sequence SEQ ID NO: 23, or an amino acid sequence which differs by no more than 1, 2, 5, 10, or 15 amino acid residues from the amino acid sequence of SEQ ID NO. 23; and a VL domain comprising the amino acid sequence of SEQ ID NO: 30, an amino acid sequence at least about 85%, 90%, 95%, 99% or more identical to the amino acid sequence SEQ ID NO: 30, or an amino acid sequence which differs by no more than 1, 2, 5, 10, or 15 amino acid residues from the amino acid sequence of SEQ ID NO: 30.

[0563] In some embodiments, the anti-TCRβV antibody molecule, e.g., anti-TCRβ V12 antibody molecule comprises: a VH domain comprising the amino acid sequence of SEQ ID NO: 24 or 25, an amino acid sequence at least about 85%, 90%, 95%, 99% or more identical to the amino acid sequence SEQ ID NO: 24 or 25, or an amino acid sequence which differs by no more than 1, 2, 5, 10, or 15 amino acid residues from the amino acid sequence of SEQ ID NO: 24 or 25; and a VL domain comprising the amino acid sequence of SEQ ID NO: 26, an amino acid sequence at least about 85%, 90%, 95%, 99% or more identical to the amino acid sequence SEQ ID NO: 26, or an amino acid sequence which differs by no more than 1, 2, 5, 10, or 15 amino acid residues from the amino acid sequence of SEQ ID NO: 26.

[0564] In some embodiments, the anti-TCRβV antibody molecule, e.g., anti-TCRβ V12 antibody molecule comprises: a VH domain comprising the amino acid sequence of SEQ ID NO: 24 or 25, an amino acid sequence at least about 85%, 90%, 95%, 99% or more identical to the amino acid sequence SEQ ID NO: 24 or 25, or an amino acid sequence which differs by no more than 1, 2, 5, 10, or 15 amino acid residues from the amino acid sequence of SEQ ID NO: 24 or 25; and a VL domain comprising the amino acid sequence of SEQ ID NO: 27, an amino acid sequence at least about 85%, 90%, 95%, 99% or more identical to the amino acid sequence SEQ ID NO: 27, or an amino acid sequence which differs by no more than 1, 2, 5, 10, or 15 amino acid residues from the amino acid sequence of SEQ ID NO: 27.

[0565] In some embodiments, the anti-TCRβV antibody molecule, e.g., anti-TCRβ V12 antibody molecule comprises: a VH domain comprising the amino acid sequence of SEQ ID NO: 24 or 25, an amino acid sequence at least about 85%, 90%, 95%, 99% or more identical to the amino acid sequence SEQ ID NO: 24 or 25, or an amino acid sequence which differs by no more than 1, 2, 5, 10, or 15 amino acid residues from the amino acid sequence of SEQ ID NO: 24 or 25; and a VL domain comprising the amino acid sequence of SEQ ID NO: 28, an amino acid sequence at least about 85%, 90%, 95%, 99% or more identical to the amino acid sequence SEQ ID NO: 28, or an amino acid sequence which differs by no more than 1, 2, 5, 10, or 15 amino acid residues from the amino acid sequence of SEQ ID NO: 28.

[0566] In some embodiments, the anti-TCRβV antibody molecule, e.g., anti-TCRβ V12 antibody molecule comprises: a VH domain comprising the amino acid sequence of SEQ ID NO: 24 or 25, an amino acid sequence at least about 85%, 90%, 95%, 99% or more identical to the amino acid sequence SEQ ID NO: 24 or 25, or an amino acid sequence which differs by no more than 1, 2, 5, 10, or 15 amino acid residues from the amino acid sequence of SEQ ID NO: 24 or 25; and a VL domain comprising the amino acid sequence of SEQ ID NO: 29, an amino acid sequence at least about 85%, 90%, 95%, 99% or more identical to the amino acid sequence SEQ ID NO: 29, or an amino acid sequence which differs by no more than 1, 2, 5, 10, or 15 amino acid residues from the amino acid sequence of SEQ ID NO: 29.

[0567] In some embodiments, the anti-TCRβV antibody molecule, e.g., anti-TCRβ V12 antibody molecule comprises: a VH domain comprising the amino acid sequence of SEQ ID NO: 24 or 25, an amino acid sequence at least about 85%, 90%, 95%, 99% or more identical to the amino acid sequence SEQ ID NO: 24 or 25, or an amino acid sequence which differs by no more than 1, 2, 5, 10, or 15 amino acid residues from the amino acid sequence of SEQ ID NO: 24 or 25; and a VL domain comprising the amino acid sequence of SEQ ID NO: 30, an amino acid sequence at least about 85%, 90%, 95%, 99% or more identical to the amino acid sequence SEQ ID NO: 30, or an amino acid sequence which differs by no more than 1, 2, 5, 10, or 15 amino acid residues from the amino acid sequence of SEQ ID NO: 30.

[0568] In some embodiments, the anti-TCRβV antibody molecule, e.g., anti-TCRβ V12 antibody molecule comprises: a VH domain comprising the amino acid sequence of SEQ ID NO: 25 or 23, an amino acid sequence at least about 85%, 90%, 95%, 99% or more identical to the amino acid sequence SEQ ID NO: 25 or 23, or an amino acid sequence which differs by no more than 1, 2, 5, 10, or 15 amino acid residues from the amino acid sequence of SEQ ID NO: 25 or 23; and a VL domain comprising the amino acid sequence of SEQ ID NO: 26, an amino acid sequence at least about 85%, 90%, 95%, 99% or more identical to the amino acid sequence SEQ ID NO: 26, or an amino acid sequence which differs by no more than 1, 2, 5, 10, or 15 amino acid residues from the amino acid sequence of SEQ ID NO: 26.

[0569] In some embodiments, the anti-TCRβV antibody molecule, e.g., anti-TCRβ V12 antibody molecule comprises: a VH domain comprising the amino acid sequence of SEQ ID NO: 25 or 23, an amino acid sequence at least about 85%, 90%, 95%, 99% or more identical to the amino acid sequence SEQ ID NO: 25 or 23, or an amino acid sequence which differs by no more than 1, 2, 5, 10, or 15 amino acid residues from the amino acid sequence of SEQ ID NO: 25 or 23; and a VL domain comprising the amino acid sequence of SEQ ID NO: 27, an amino acid sequence at least about 85%, 90%, 95%, 99% or more identical to the amino acid sequence SEQ ID NO: 27, or an amino acid sequence which differs by no more than 1, 2, 5, 10, or 15 amino acid residues from the amino acid sequence of SEQ ID NO: 27.

[0570] In some embodiments, the anti-TCRβV antibody molecule, e.g., anti-TCRβ V12 antibody molecule comprises: a VH domain comprising the amino acid sequence of SEQ ID NO: 25 or 23, an amino acid sequence at least about 85%, 90%, 95%, 99% or more identical to the amino acid sequence SEQ ID NO: 25 or 23, or an amino acid sequence which differs by no more than 1, 2, 5, 10, or 15 amino acid residues from the amino acid sequence of SEQ ID NO: 25 or 23; and a VL domain comprising the amino acid sequence of SEQ ID NO: 28, an amino acid sequence at least about 85%, 90%, 95%, 99% or more identical to the amino acid sequence SEQ ID NO: 28, or an amino acid sequence which differs by no more than 1, 2, 5, 10, or 15 amino acid residues from the amino acid sequence of SEQ ID NO: 28.

[0571] In some embodiments, the anti-TCRβV antibody molecule, e.g., anti-TCRβ V12 antibody molecule comprises: a VH domain comprising the amino acid sequence of SEQ ID NO: 25 or 23, an amino acid sequence at least about 85%, 90%, 95%, 99% or more identical to the amino acid sequence SEQ ID NO: 25 or 23, or an amino acid sequence which differs by no more than 1, 2, 5, 10, or 15 amino acid residues from the amino acid sequence of SEQ ID NO: 25 or 23; and a VL domain comprising the amino acid sequence of SEQ ID NO: 29, an amino acid sequence at least about 85%, 90%, 95%, 99% or more identical to the amino acid sequence SEQ ID NO: 29, or an amino acid sequence which differs by no more than 1, 2, 5, 10, or 15 amino acid residues from the amino acid sequence of SEQ ID NO: 29.

[0572] In some embodiments, the anti-TCRβV antibody molecule, e.g., anti-TCRβ V12 antibody molecule comprises: a VH domain comprising the amino acid sequence of SEQ ID NO. 25 or 23, an amino acid sequence at least about 85%, 90%, 95%, 99% or more identical to the amino acid sequence SEQ ID NO: 25 or 23, or an amino acid sequence which differs by no more than 1, 2, 5, 10, or 15 amino acid residues from the amino acid sequence of SEQ ID NO: 25 or 23; and a VL domain comprising the amino acid sequence of SEQ ID NO: 30, an amino acid sequence at least about 85%, 90%, 95%, 99% or more identical to the amino acid sequence SEQ ID NO: 30, or an amino acid sequence which differs by no more than 1, 2, 5, 10, or 15 amino acid residues from the amino acid sequence of SEQ ID NO: 30.

[0573] In some embodiments, the anti-TCRβV antibody molecule, e.g., anti-TCRβ V12 antibody molecule is a full antibody or fragment thereof (e.g., a Fab, F(ab′)₂. Fv, or a single chain Fv fragment (scFv)). In embodiments, the anti-TCRβV antibody molecule, e.g., anti-TCRβ V6 (e.g., anti-TCRβ V6-5*01) antibody molecule is a monoclonal antibody or an antibody with single specificity. In some embodiments, the anti-TCRβV antibody molecule, e.g., anti-TCRβ V12 antibody molecule, can also be a humanized, chimeric, camelid, shark, or an in vitro-generated antibody molecule. In some embodiments, the anti-TCRβV antibody molecule, e.g., anti-TCRβ V12 antibody molecule is a humanized antibody molecule. The heavy and light chains of the anti-TCRβV antibody molecule, e.g., anti-TCRβ V12 antibody molecule can be full-length (e.g., an antibody can include at least one, and preferably two, complete heavy chains, and at least one, and preferably two, complete light chains) or can include an antigen-binding fragment (e.g., a Fab, F(ab′) 2. Fv, a single chain Fv fragment, a single domain antibody, a diabody (dAb), a bivalent antibody, or bispecific antibody or fragment thereof, a single domain variant thereof, or a camelid antibody).

[0574] In some embodiments, the anti-TCRβV antibody molecule, e.g., anti-TCRβ V12 antibody molecule is in the form of a multispecific molecule, e.g., a bispecific molecule, e.g., as described herein.

[0575] In some embodiments, the anti-TCRβV antibody molecule, e.g., anti-TCRβ V12 antibody molecule has a heavy chain constant region (Fc) chosen from, e.g., the heavy chain constant regions of IgG1. IgG2, IgG3, IgG4, IgM, IgA1, IgA2, IgD, and IgE. In some embodiments, the Fc region is chosen from the heavy chain constant regions of IgG1, IgG2, IgG3, and IgG4. In some embodiments, the Fc region is chosen from the heavy chain constant region of IgG1 or IgG2 (e.g., human IgG1, or IgG2). In some embodiments, the heavy chain constant region is human IgG1.

[0576] In some embodiments, the anti-TCRβV antibody molecule, e.g., anti-TCRβ V12 antibody molecule has a light chain constant region chosen from, e.g., the light chain constant regions of kappa or lambda, preferably kappa (e.g., human kappa). In some embodiments, the constant region is altered, e.g., mutated, to modify the properties of the anti-TCRβV antibody molecule, e.g., anti-TCRβ V12 antibody molecule (e.g., to increase or decrease one or more of: Fc receptor binding, antibody glycosylation, the number of cysteine residues, effector cell function, or complement function). For example, the constant region is mutated at positions 296 (M to Y). 298 (S to T), 300 (T to E), 477 (H to K) and 478 (N to F) to alter Fc receptor binding (e.g., the mutated positions correspond to positions 132 (M to Y), 134 (S to T). 136 (T to E). 313 (H to K) and 314 (N to F) of SEQ ID NOs: 212 or 214; or positions 135 (M to Y), 137 (S to T). 139 (T to E). 316 (H to K) and 317 (N to F) of SEQ ID NOs: 215, 216, 217 or 218).

[0577] Antibody B-H.1 comprises a first chain comprising the amino acid sequence of SEQ ID NO: 3280 and a second chain comprising the amino acid sequence of SEQ ID NO: 3281.

[0578] Additional exemplary anti-TCRβ V12 antibodies are provided in Table 2. In some embodiments, the anti-TCRβ V12 is antibody B, e.g., humanized antibody B (antibody B-H), as provided in Table 2. In some embodiments, the anti-TCRβV antibody comprises one or more (e.g., all three) of a LC CDR1, LC CDR2, and LC CDR3 provided in Table 2, and/or one or more (e.g., all three) of a HC CDR1, HC CDR2, and HC CDR3 provided in Table 2, or a sequence with at least 95% sequence identity thereto. In some embodiments, antibody B comprises a variable heavy chain (VH) and/or a variable light chain (VL) provided in Table 2, or a sequence with at least 95% sequence identity thereto.

[0579] In some embodiments, the anti-TCRVB 12 antibody molecule (e.g., anti-TCRVB 12-3 or anti-TCRVB 12-4 antibody molecule) comprises a VH of B-H.1A, B-H.1B, B-H.1C, B-H.1D, B-H.1E, B-H.1F, B-H.1G, B-H.1H, B-H.1, B-H.2, B-H.3, B-H.4, B-H.5, or B-H.6, or a sequence with at least 80%, 85%, 90%, 95%, 96%, 97%, 98%, 99% or more identity thereto.

[0580] In some embodiments, the anti-TCRVB 12 antibody molecule (e.g., anti-TCRVB 12-3 or anti-TCRVB 12-4 antibody molecule) comprises a VL of B-H.1A, B-H.1B, B-H.1C, B-H.1D, B-H.1E, B-H.1F, B-H.1G. B-H.1H. B-H.1. B-H.2, B-H.3, B-H.4, B-H.5, or B-H.6, or a sequence with at least 80%, 85%, 90%, 95%, 96%, 97%, 98%, 99% or more identity thereto.

[0581] In some embodiments, the anti-TCRVB 12 antibody molecule (e.g., anti-TCRVB 12-3 or anti-TCRVB 12-4 antibody molecule) comprises a VH of B-H.1A. B-H.1B. B-H.1C, B-H.1D, B-H.1E, B-H.1F, B-H.1G, B-H.1H, B-H.1, B-H.2, B-H.3, B-H.4, B-H.5, or B-H.6, or a sequence with at least 80%, 85%, 90%, 95%, 96%, 97%, 98%, 99% or more identity thereto; and a VL of B-H.1A, B-H.1B, B-H.1C, B-H.1D, B-H.1E. B-H.1F, B-H.1G, B-H.1H. B-H.1. B-H.2, B-H.3. B-H.4, B-H.5, or B-H.6, or a sequence with at least 80%, 85%, 90%, 95%, 96%, 97%, 98%, 99% or more identity thereto.

### Anti-TCRβ V5 Antibodies

[0582] In one aspect, provided herein is an anti-TCRβV antibody molecule that binds to human TCRβ V5. In some embodiments, the TCRβ V5 subfamily comprises TCRβ V5-5*01, TCRβ V5-6*01, TCRβ V5-4*01. TCRβ V5-8*01, TCRβ V5-1*01, or a variant thereof.

[0583] Exemplary anti-TCRβ V5 antibodies are provided in Table 10B. In some embodiments, the anti-TCRβ V5 is antibody C, e.g., humanized antibody C (antibody C-H), as provided in Table 10B. In some embodiments, the anti-TCRβV antibody comprises one or more (e.g., all three) of a LC CDR1, LC CDR2, and LC CDR3 provided in Table 10B; and/or one or more (e.g., all three) of a HC CDR1, HC CDR2, and HC CDR3 provided in Table 10B, or a sequence with at least 95% sequence identity thereto. In some embodiments, antibody C comprises a variable heavy chain (VH) and/or a variable light chain (VL) provided in Table 10B, or a sequence with at least 95% sequence identity thereto.

[0584] Exemplary anti-TCRβ V5 antibodies are provided in Table 11. In some embodiments, the anti-TCRB V5 is antibody E, e.g., humanized antibody E (antibody E-H), as provided in Table 11. In some embodiments, the anti-TCRβV antibody comprises one or more (e.g., all three) of a LC CDR1, LC CDR2, and LC CDR3 provided in Table 11; and/or one or more (e.g., all three) of a HC CDR1, HC CDR2, and HC CDR3 provided in Table 11, or a sequence with at least 95% sequence identity thereto. In some embodiments, antibody E comprises a variable heavy chain (VH) and/or a variable light chain (VL) provided in Table 11, or a sequence with at least 95% sequence identity thereto.

[0585] In some embodiments, antibody E comprises a heavy chain comprising the amino acid sequence of SEQ ID NO: 3284 and/or a light chain comprising the amino acid sequence of SEQ ID NO: 3285, or a sequence with at least 95% sequence identity thereto.

[0586] In some embodiments, the anti-TCRβ V5 antibody molecule comprises a VH and/or a VL of an antibody described in Table 10B, or a sequence with at least 80%, 85%, 90%, 95%, 96%, 97%, 98%, 99% or more identity thereto.

[0587] In some embodiments, the anti-TCRβ V5 antibody molecule comprises a VH and a VL of an antibody described in Table 10B, or a sequence with at least 80%, 85%, 90%, 95%, 96%, 97%, 98%, 99% or more identity thereto.

[0588] In some embodiments, the anti-TCRβ V5 antibody molecule comprises a VH and/or a VL of an antibody described in Table 11, or a sequence with at least 80%, 85%, 90%, 95%, 96%, 97%, 98%, 99% or more identity thereto

[0589] In some embodiments, the anti-TCRβ V5 antibody molecule comprises a VH and a VL of an antibody described in Table 11, or a sequence with at least 80%, 85%, 90%, 95%, 96%, 97%, 98%, 99% or more identity thereto.

### Anti-TCRβ V10 Antibodies

[0590] In one aspect, provided herein is an anti-TCRβV antibody molecule that binds to a human TCRβ V10 subfamily member. In some embodiments, TCRβ V10 subfamily is also known as TCRβ V12. In some embodiments, the TCRβ V10 subfamily comprises: TCRβ V10-1*01, TCRβ V10-1*02, TCRβ V10-3*01 or TCRβ V10-2*01, or a variant thereof.

[0591] Exemplary anti-TCRβ V10 antibodies are provided in Table 12. In some embodiments, the anti-TCRβ V10 is antibody D, e.g., humanized antibody D (antibody D-H), as provided in Table 12. In some embodiments, antibody D comprises one or more (e.g., three) light chain CDRs and/or one or more (e.g., three) heavy chain CDRs provided in Table 12, or a sequence with at least 95% sequence identity thereto. In some embodiments, antibody D comprises a variable heavy chain (VH) and/or a variable light chain (VL) provided in Table 12, or a sequence with at least 95% sequence identity thereto.

[0592] In some embodiments, the anti-TCRβ V10 antibody molecule comprises a VH or a VL of an antibody described in Table 12, or a sequence with at least 80%, 85%, 90%, 95%, 96%, 97%, 98%, 99% or more identity thereto.

[0593] In some embodiments, the anti-TCRβ V10 antibody molecule comprises a VH and a VL of an antibody described in Table 12, or a sequence with at least 80%, 85%, 90%, 95%, 96%, 97%, 98%, 99% or more identity thereto.

Additional anti-TCRVβ Antibodies

[0594] Additional exemplary anti-TCRβV antibodies are provided in Table 13. In some embodiments, the anti-TCRβV antibody is a humanized antibody, e.g., as provided in Table 13. In some embodiments, the anti-TCRβV antibody comprises one or more (e.g., all three) of a LC CDR1, LC CDR2, and LC CDR3 provided in Table 13; and/or one or more (e.g., all three) of a HC CDR1, HC CDR2, and HC CDR3 provided in Table 13, or a sequence with at least 95% sequence identity thereto. In some embodiments, the anti-TCRβV antibody comprises a variable heavy chain (VH) and/or a variable light chain (VL) provided in Table 13, or a sequence with at least 95% sequence identity thereto.

### Antibody-Like Frameworks or Scaffolds

[0595] A wide variety of antibody/immunoglobulin frameworks or scaffolds can be employed in the anti-TCRvb antibody molecules as described herein or multifunctional formats thereof so long as the resulting polypeptide includes at least one binding region which specifically binds to the target antigen, e.g., a TCRvb, a tumor antigen, among others. Such frameworks or scaffolds include the 5 main idiotypes of human immunoglobulins, or fragments thereof, and include immunoglobulins of other animal species, preferably having humanized aspects. Novel frameworks, scaffolds and fragments continue to be discovered and developed by those skilled in the art.

[0596] In some embodiments, the anti-TCRvb antibody molecules as described herein or multifunctional formats thereof include non-immunoglobulin based antibodies using non-immunoglobulin scaffolds onto which CDRs can be grafted. Any non-immunoglobulin frameworks and scaffolds may be employed, as long as they comprise a binding region specific for the target antigen (e.g., TCRvb or a tumor antigen). Exemplary non-immunoglobulin frameworks or scaffolds include, but are not limited to, fibronectin (Compound Therapeutics, Inc., Waltham, MA), ankyrin (Molecular Partners AG, Zurich, Switzerland), domain antibodies (Domantis. Ltd., Cambridge, MA, and Ablynx nv, Zwijnaarde, Belgium), lipocalin (Pieris Proteolab AG, Freising, Germany), small modular immuno-pharmaceuticals (Trubion Pharmaceuticals Inc., Seattle, WA), maxybodies (Avidia, Inc., Mountain View, CA), Protein A (Affibody AG, Sweden), and affilin (gamma-crystallin or ubiquitin) (Scil Proteins GmbH, Halle, Germany).

[0597] Fibronectin scaffolds are typically based on fibronectin type III domain (e.g., the tenth module of the fibronectin type III (10 Fn3 domain)). The fibronectin type III domain has 7 or 8 beta strands which are distributed between two beta sheets, which themselves pack against each other to form the core of the protein, and further containing loops (analogous to CDRs) which connect the beta strands to each other and are solvent exposed. There are at least three such loops at each edge of the beta sheet sandwich, where the edge is the boundary of the protein perpendicular to the direction of the beta strands (see U.S. Pat. No. 6,818,418). Because of this structure, the non-immunoglobulin antibody mimics antigen binding properties that are similar in nature and affinity to those of antibodies. These scaffolds can be used in a loop randomization and shuffling strategy in vitro that is similar to the process of affinity maturation of antibodies in vivo. These fibronectin-based molecules can be used as scaffolds where the loop regions of the molecule can be replaced with CDRs of the invention using standard cloning techniques.

[0598] The ankyrin technology is based on using proteins with ankyrin derived repeat modules as scaffolds for bearing variable regions which can be used for binding to different targets. The ankyrin repeat module typically is a about 33 amino acid polypeptide consisting of two anti-parallel α-helices and a β-turn. Binding of the variable regions can be optimized by using ribosome display.

[0599] Avimers are used by nature for protein-protein interactions and in human over 250 proteins are structurally based on A-domains. Avimers consist of a number of different “A-domain” monomers (2-10) linked via amino acid linkers. Avimers can be created that can bind to the target antigen using the methodology described in, for example, U.S. Patent Application Publication Nos. 20040175756; 20050053973; 20050048512; and 20060008844.

[0600] Affibody affinity ligands are small, simple proteins composed of a three-helix bundle based on the scaffold of one of the IgG-binding domains of Protein A. Protein A is a surface protein from the bacterium Staphylococcus aureus. This scaffold domain consists of 58 amino acids, 13 of which are randomized to generate affibody libraries with a large number of ligand variants (See e.g., U.S. Pat. No. 5,831,012). Affibody molecules mimic antibodies, they have a molecular weight of 6 kDa, compared to the molecular weight of antibodies, which is 150 kDa. In spite of its small size, the binding site of affibody molecules is similar to that of an antibody.

[0601] Anticalins are known commercially, e.g., Pieris ProteoLab AG. They are derived from lipocalins, a widespread group of small and robust proteins that are usually involved in the physiological transport or storage of chemically sensitive or insoluble compounds. Several natural lipocalins occur in human tissues or body liquids. The protein architecture is reminiscent of immunoglobulins, with hypervariable loops on top of a rigid framework. However, in contrast with antibodies or their recombinant fragments, lipocalins are composed of a single polypeptide chain with 160 to 180 amino acid residues, being just marginally bigger than a single immunoglobulin domain. The set of four loops, which makes up the binding pocket, shows pronounced structural plasticity and tolerates a variety of side chains. The binding site can thus be reshaped in a proprietary process in order to recognize prescribed target molecules of different shape with high affinity and specificity One protein of lipocalin family, the bilin-binding protein (BBP) of Pieris Brassicae has been used to develop anticalins by mutagenizing the set of four loops. One example of a patent application describing anticalins is in PCT Publication No. WO 199916873.

[0602] Affilin molecules are small non-immunoglobulin proteins which are designed for specific affinities towards proteins and small molecules. New affilin molecules can be very quickly selected from two libraries, each of which is based on a different human derived scaffold protein. Affilin molecules do not show any structural homology to immunoglobulin proteins. Currently, two affilin scaffolds are employed, one of which is gamma crystalline, a human structural eye lens protein and the other is “ubiquitin” superfamily proteins. Both human scaffolds are very small, show high temperature stability and are almost resistant to pH changes and denaturing agents. This high stability is mainly due to the expanded beta sheet structure of the proteins. Examples of gamma crystalline derived proteins are described in WO200104144 and examples of “ubiquitin-like” proteins are described in WO2004106368.

[0603] Protein epitope mimetics (PEM) are medium-sized, cyclic, peptide-like molecules (MW 1-2 kDa) mimicking beta-hairpin secondary structures of proteins, the major secondary structure involved in protein-protein interactions.

[0604] Domain antibodies (dAbs) can be used in the anti-TCRvb antibody molecules as described herein or multifunctional formats thereof are small functional binding fragments of antibodies, corresponding to the variable regions of either the heavy or light chains of antibodies. Domain antibodies are well expressed in bacterial, yeast, and mammalian cell systems. Further details of domain antibodies and methods of production thereof are known in the art (see, for example, U.S. Pat. Nos. 6,291,158; 6,582,915; 6,593,081; 6,172,197; 6,696,245; European Patents 0368684 & 0616640; WO05/035572, WO04/101790, WO04/081026, WO04/058821, WO04/003019 and WO03/002609. Nanobodies are derived from the heavy chains of an antibody.

[0605] A nanobody typically comprises a single variable domain and two constant domains (CH2 and CH3) and retains antigen-binding capacity of the original antibody. Nanobodies can be prepared by methods known in the art (See e.g., U.S. Pat. Nos. 6,765,087, 6,838,254, WO 06/079372). Unibodies consist of one light chain and one heavy chain of an IgG4 antibody. Unibodies may be made by the removal of the hinge region of IgG4 antibodies. Further details of unibodies and methods of preparing them may be found in WO2007/059782.

### Anti-TCRVβ Antibody Effector Function and Fc Variants

[0606] In some embodiments, an anti-TCRVβ antibody as described herein comprises an Fc region, e.g., as described herein. In some embodiments, the Fc region is a wildtype Fc region, e.g., a wildtype human Fc region. In some embodiments, the Fc region comprises a variant, e.g., an Fc region comprising an addition, substitution, or deletion of at least one amino acid residue in the Fc region which results in, e.g., reduced or ablated affinity for at least one Fc receptor.

[0607] The Fc region of an antibody interacts with a number of receptors or ligands including Fc Receptors (e.g., FcγRI, FcγRIIA, FcγRIIIA), the complement protein CIq, and other molecules such as proteins A and G. These interactions are essential for a variety of effector functions and downstream signaling events including; antibody dependent cell-mediated cytotoxicity (ADCC), Antibody-dependent cellular phagocytosis (ADCP) and complement dependent cytotoxicity (CDC).

[0608] In some embodiments, an anti-TCRVβ antibody comprising a variant Fc region has reduced, e.g., ablated, affinity for an Fc receptor, e.g., an Fc receptor described herein. In some embodiments, the reduced affinity is compared to an otherwise similar antibody with a wildtype Fc region.

[0609] In some embodiments, an anti-TCRVβ antibody comprising a variant Fc region has one or more of the following properties: (1) reduced effector function (e.g., reduced ADCC. ADCP and/or CDC): (2) reduced binding to one or more Fc receptors; and/or (3) reduced binding to C1q complement. In some embodiments, the reduction in any one, or all of properties (1)-(3) is compared to an otherwise similar antibody with a wildtype Fc region.

[0610] In some embodiments, an anti-TCRVβ antibody comprising a variant Fc region has reduced affinity to a human Fc receptor, e.g., FcγR I, FcγR II and/or FcγR III. In some embodiments, the anti-TCRVβ antibody comprising a variant Fc region comprises a human IgG1 region or a human IgG4 region.

[0611] In some embodiments, an anti-TCRVβ antibody comprising a variant Fc region activates and/or expands T cells, e.g., as described herein. In some embodiments, an anti-TCRVβ antibody comprising a variant Fc region has a cytokine profile described herein, e.g., a cytokine profile that differs from a cytokine profile of a T cell engager that binds to a receptor or molecule other than a TCRβV region (“a non-TCRβV-binding T cell engager”). In some embodiments, the non-TCRβV-binding T cell engager comprises an antibody that binds to a CD3 molecule (e.g., CD3 epsilon (CD3e) molecule); or a TCR alpha (TCRα) molecule.

[0612] Exemplary Fc region variants are provided in Table 14 and also disclosed in Saunders O, (2019) Frontiers in Immunology; vol 10, article 1296, the entire contents of which is hereby incorporated by reference.

[0613] In some embodiments, an anti-TCRVβ antibody as described herein comprises any one or all, or any combination of Fc region variants disclosed in Table 14.

[0614] In some embodiments, an anti-TCRVβ antibody as described herein comprises any one or all, or any combination of Fc region variants, e.g., mutations, disclosed in Table 14. In some embodiments, an anti-TCRVβ antibody as described herein comprise an Asn297Ala (N297A) mutation. In some embodiments, an anti-TCRVβ antibody as described herein comprise a Leu234Ala/Leu235Ala (LALA) mutation.

### Multifunctional Molecules

[0615] As used herein, a “multifunctional” or a “multispecific” molecule refers to molecule, e.g., a polypeptide, that has two or more functionalities, e.g., two or more binding specificities. In some embodiments, the functionalities can include one or more immune cell engagers, one or more tumor binding molecules, one or more cytokine molecules, one or more stromal modifiers, and other moieties described herein. In some embodiments, the multispecific molecule is a multispecific antibody molecule, e.g., a bispecific antibody molecule. In some embodiments, the multispecific molecule includes an anti-TCRVb antibody molecule as described herein.

[0616] Described herein, in certain embodiments, is a multifunctional polypeptide molecule comprising a first polypeptide chain, a second polypeptide chain, a third polypeptide chain, a fourth polypeptide chain, and at least one cytokine polypeptide or a functional fragment or a functional variant thereof, wherein the first polypeptide chain, the second polypeptide chain, the third polypeptide chain, and the fourth polypeptide chain are non-contiguous, wherein: (i) the first polypeptide chain comprising a first portion of a first T cell receptor variable beta (TCRβV)-binding moiety and a first dimerization module linked to the first portion of the first TCRβV-binding moiety; (ii) the second polypeptide chain comprising a second portion of the first TCRβV-binding moiety; (iii) the third polypeptide chain comprising a first portion of a second TCRβV-binding moiety and a second dimerization module linked to the first portion of the second TCRβV-binding moiety; and (iv) the fourth polypeptide chain comprising a second portion of the second TCRβV-binding moiety; and wherein the at least one cytokine polypeptide or a functional fragment or a functional variant thereof is covalently linked to the first polypeptide chain, the second polypeptide chain, the third polypeptide chain, the fourth polypeptide chain, or a combination thereof.

[0617] Described herein, in certain embodiments, is a multifunctional polypeptide molecule comprising a first polypeptide chain, a second polypeptide chain, a third polypeptide chain, and at least one cytokine polypeptide or a functional fragment or a functional variant thereof, wherein the first polypeptide chain, the second polypeptide chain, and the third polypeptide chain are non-contiguous, wherein: (i) the first polypeptide chain comprising a first portion of a first TCRβV-binding moiety and a first dimerization module linked to the first portion of the first TCRβV-binding moiety; (ii) the second polypeptide chain comprising a second portion of the first TCRβV-binding moiety; and (iii) the third polypeptide chain comprising a second dimerization module; and wherein the at least one cytokine polypeptide or a functional fragment or a functional variant thereof is covalently linked to the first polypeptide chain, the second polypeptide chain, the third polypeptide chain, or a combination thereof.

[0618] Described herein, in certain embodiments, is a multifunctional polypeptide molecule comprising a first polypeptide chain, a second polypeptide chain, a third polypeptide chain, and at least one cytokine polypeptide or a functional fragment or a functional variant thereof, wherein the first polypeptide chain, the second polypeptide chain, and the third polypeptide chain are non-contiguous, wherein: (i) the first polypeptide chain comprising a first portion of a first TCRβV-binding moiety and a first dimerization module linked to the first portion of the first TCRβV-binding moiety; (ii) the second polypeptide chain comprising a second portion of the first TCRβV-binding moiety; and (iii) the third polypeptide chain comprising a second dimerization module: wherein the at least one cytokine polypeptide or a functional fragment or a functional variant thereof is covalently linked to the first polypeptide chain, the second polypeptide chain, the third polypeptide chain, or a combination thereof; and wherein the multifunctional polypeptide molecule does not comprise an additional TCRβV-binding moiety except the first TCRβV-binding moiety.

[0619] In some embodiments, the first portion of the first TCRβV-binding moiety comprises a first heavy chain variable domain (VH) and a first heavy chain constant domain 1 (CH1) linked to the first VH. In some embodiments, the first CH1 is linked to the C-terminus of the first VH. In some embodiments, the second portion of the first TCRβV-binding moiety comprises a first light chain variable domain (VL) and a first light chain constant domain (CL) linked to the first VL. In some embodiments, first CL is linked to the C-terminus of the first VL. In some embodiments, wherein the first dimerization module is linked to the first portion of the first TCRβV-binding moiety. In some embodiments, the first dimerization module is linked to the C-terminus of the first portion of the first TCRβV-binding moiety. In some embodiments, wherein the first portion of the second TCRβV-binding moiety comprises a second VH and a second CH1 linked to the second VH. In some embodiments, the second CH1 is linked to the C-terminus of the second VH. In some embodiments, the second portion of the second TCRβV-binding moiety comprises a second VL and a second CL linked to the second VL. In some embodiments, the second CL is linked to the C-terminus of the second VL. In some embodiments, the second dimerization module is linked to the first portion of the second TCRβV-binding moiety. In some embodiments, the second dimerization module is linked to the C-terminus of the first portion of the second TCRβV-binding moiety.

[0620] In some embodiments. (a) the N-terminus of the first polypeptide chain is linked to a first cytokine polypeptide or a functional fragment or a functional variant thereof; the C-terminus of the first polypeptide chain is linked to a second cytokine polypeptide or a functional fragment or a functional variant thereof; or a combination thereof; (b) the N-terminus of the second polypeptide chain is linked to a third cytokine polypeptide or a functional fragment or a functional variant thereof; the C-terminus of the second polypeptide chain is linked to a fourth cytokine polypeptide or a functional fragment or a functional variant thereof; or a combination thereof; (c) the N-terminus of the third polypeptide chain is linked to a fifth cytokine polypeptide or a functional fragment or a functional variant thereof; the C-terminus of the third polypeptide chain is linked to a sixth cytokine polypeptide or a functional fragment or a functional variant thereof; or a combination thereof; (d) the N-terminus of the fourth polypeptide chain is linked to a seventh cytokine polypeptide or a functional fragment or a functional variant thereof; the C-terminus of the fourth polypeptide chain is linked to an eighth cytokine polypeptide or a functional fragment or a functional variant thereof; or a combination thereof; or (e) a combination thereof.

[0621] In some embodiments, (a-1) the N-terminus of the first polypeptide chain is linked to the first cytokine polypeptide or a functional fragment or a functional variant thereof; the C-terminus of the first polypeptide chain is linked to the second cytokine polypeptide or a functional fragment or a functional variant thereof; or a combination thereof; and (a-2) the N-terminus of the second polypeptide chain is linked to the third cytokine polypeptide or a functional fragment or a functional variant thereof; the C-terminus of the second polypeptide chain is linked to the fourth cytokine polypeptide or a functional fragment or a functional variant thereof; or a combination thereof; (b-1) the N-terminus of the first polypeptide chain is linked to the first cytokine polypeptide or a functional fragment or a functional variant thereof; the C-terminus of the first polypeptide chain is linked to the second cytokine polypeptide or a functional fragment or a functional variant thereof; or a combination thereof; and (b-2) the N-terminus of the third polypeptide chain is linked to the fifth cytokine polypeptide or a functional fragment or a functional variant thereof; the C-terminus of the third polypeptide chain is linked to the sixth cytokine polypeptide or a functional fragment or a functional variant thereof; or a combination thereof; (c-1) the N-terminus of the first polypeptide chain is linked to the first cytokine polypeptide or a functional fragment or a functional variant thereof, the C-terminus of the first polypeptide chain is linked to the second cytokine poly peptide or a functional fragment or a functional variant thereof; or a combination thereof; and (c-2) the N-terminus of the fourth polypeptide chain is linked to the seventh cytokine polypeptide or a functional fragment or a functional variant thereof; the C-terminus of the fourth polypeptide chain is linked to the eighth cytokine polypeptide or a functional fragment or a functional variant thereof, or a combination thereof; (d-1) the N-terminus of the second polypeptide chain is linked to the third cytokine polypeptide or a functional fragment or a functional variant thereof; the C-terminus of the second polypeptide chain is linked to the fourth cytokine polypeptide or a functional fragment or a functional variant thereof; or a combination thereof; and (d-2) the N-terminus of the third polypeptide chain is linked to the fifth cytokine polypeptide or a functional fragment or a functional variant thereof; the C-terminus of the third polypeptide chain is linked to the sixth cytokine polypeptide or a functional fragment or a functional variant thereof; or a combination thereof; (e-1) the N-terminus of the second polypeptide chain is linked to the third cytokine polypeptide or a functional fragment or a functional variant thereof; the C-terminus of the second polypeptide chain is linked to the fourth cytokine polypeptide or a functional fragment or a functional variant thereof; or a combination thereof; and (e-2) the N-terminus of the fourth polypeptide chain is linked to the seventh cytokine polypeptide or a functional fragment or a functional variant thereof; the C-terminus of the fourth polypeptide chain is linked to the eighth cytokine polypeptide or a functional fragment or a functional variant thereof; or a combination thereof; or (f-1) the N-terminus of the third polypeptide chain is linked to the fifth cytokine polypeptide or a functional fragment or a functional variant thereof; the C-terminus of the third polypeptide chain is linked to the sixth cytokine polypeptide or a functional fragment or a functional variant thereof; or a combination thereof; and (f-2) the N-terminus of the fourth polypeptide chain is linked to the seventh cytokine polypeptide or a functional fragment or a functional variant thereof; the C-terminus of the fourth polypeptide chain is linked to the eighth cytokine polypeptide or a functional fragment or a functional variant thereof; or a combination thereof.

[0622] In some embodiments, (a-1) the N-terminus of the first polypeptide chain is linked to the first cytokine polypeptide or a functional fragment or a functional variant thereof; the C-terminus of the first poly peptide chain is linked to the second cytokine poly peptide or a functional fragment or a functional variant thereof; or a combination thereof; (a-2) the N-terminus of the second polypeptide chain is linked to the third cytokine polypeptide or a functional fragment or a functional variant thereof; the C-terminus of the second polypeptide chain is linked to the fourth cytokine polypeptide or a functional fragment or a functional variant thereof; or a combination thereof; and (a-3) the N-terminus of the third polypeptide chain is linked to the fifth cytokine polypeptide or a functional fragment or a functional variant thereof; the C-terminus of the third polypeptide chain is linked to the sixth cytokine polypeptide or a functional fragment or a functional variant thereof; or a combination thereof; (b-1) the N-terminus of the first polypeptide chain is linked to the first cytokine polypeptide or a functional fragment or a functional variant thereof, the C-terminus of the first polypeptide chain is linked to the second cytokine poly peptide or a functional fragment or a functional variant thereof; or a combination thereof; (b-2) the N-terminus of the second polypeptide chain is linked to the third cytokine polypeptide or a functional fragment or a functional variant thereof; the C-terminus of the second polypeptide chain is linked to the fourth cytokine polypeptide or a functional fragment or a functional variant thereof, or a combination thereof; and (b-3) the N-terminus of the fourth polypeptide chain is linked to the seventh cytokine polypeptide or a functional fragment or a functional variant thereof; the C-terminus of the fourth polypeptide chain is linked to the eighth cytokine polypeptide or a functional fragment or a functional variant thereof; or a combination thereof; or (c-1) the N-terminus of the second polypeptide chain is linked to the third cytokine polypeptide or a functional fragment or a functional variant thereof; the C-terminus of the second polypeptide chain is linked to the fourth cytokine polypeptide or a functional fragment or a functional variant thereof; or a combination thereof; (c-2) the N-terminus of the third polypeptide chain is linked to the fifth cytokine polypeptide or a functional fragment or a functional variant thereof; the C-terminus of the third polypeptide chain is linked to the sixth cytokine polypeptide or a functional fragment or a functional variant thereof; or a combination thereof; and (c-3) the N-terminus of the fourth polypeptide chain is linked to the seventh cytokine polypeptide or a functional fragment or a functional variant thereof; the C-terminus of the fourth polypeptide chain is linked to the eighth cytokine polypeptide or a functional fragment or a functional variant thereof; or a combination thereof.

[0623] In some embodiments. (1) the N-terminus of the first polypeptide chain is linked to the first cytokine polypeptide or a functional fragment or a functional variant thereof; the C-terminus of the first polypeptide chain is linked to the second cytokine polypeptide or a functional fragment or a functional variant thereof; or a combination thereof; (2) the N-terminus of the second polypeptide chain is linked to the third cytokine polypeptide or a functional fragment or a functional variant thereof; the C-terminus of the second polypeptide chain is linked to the fourth cytokine polypeptide or a functional fragment or a functional variant thereof; or a combination thereof; (3) the N-terminus of the third polypeptide chain is linked to the fifth cytokine polypeptide or a functional fragment or a functional variant thereof; the C-terminus of the third polypeptide chain is linked to the sixth cytokine polypeptide or a functional fragment or a functional variant thereof; or a combination thereof; and (4) the N-terminus of the fourth polypeptide chain is linked to the seventh cytokine polypeptide or a functional fragment or a functional variant thereof; the C-terminus of the fourth polypeptide chain is linked to the eighth cytokine polypeptide or a functional fragment or a functional variant thereof; or a combination thereof.

[0624] In some embodiments, the first cytokine polypeptide, the second cytokine polypeptide, or a combination thereof is within a single contiguous polypeptide chain of the first polypeptide chain, the third cytokine polypeptide, the fourth cytokine polypeptide, or a combination thereof is within a single contiguous polypeptide chain of the second polypeptide chain, the fifth cytokine polypeptide, the sixth cytokine polypeptide, or a combination thereof is within a single contiguous polypeptide chain of the third polypeptide chain, the seventh cytokine polypeptide, the eighth cytokine polypeptide, or a combination thereof is within a single contiguous polypeptide chain of the fourth polypeptide chain, or a combination thereof.

[0625] In some embodiments, (a) the N-terminus of the first polypeptide chain is linked to a first cytokine polypeptide or a functional fragment or a functional variant thereof; the C-terminus of the first polypeptide chain is linked to a second cytokine polypeptide or a functional fragment or a functional variant thereof; or a combination thereof; (b) the N-terminus of the second polypeptide chain is linked to a third cytokine polypeptide or a functional fragment or a functional variant thereof; the C-terminus of the second polypeptide chain is linked to a fourth cytokine polypeptide or a functional fragment or a functional variant thereof; or a combination thereof; (c) the N-terminus of the third polypeptide chain is linked to a fifth cytokine polypeptide or a functional fragment or a functional variant thereof; the C-terminus of the third polypeptide chain is linked to a sixth cytokine polypeptide or a functional fragment or a functional variant thereof; or a combination thereof; or (d) a combination thereof.

[0626] In some embodiments. (a-1) the N-terminus of the first polypeptide chain is linked to the first cytokine polypeptide or a functional fragment or a functional variant thereof; the C-terminus of the first polypeptide chain is linked to the second cytokine polypeptide or a functional fragment or a functional variant thereof; or a combination thereof; and (a-2) the N-terminus of the second polypeptide chain is linked to the third cytokine polypeptide or a functional fragment or a functional variant thereof; the C-terminus of the second polypeptide chain is linked to the fourth cytokine polypeptide or a functional fragment or a functional variant thereof; or a combination thereof; (b-1) the N-terminus of the first polypeptide chain is linked to the first cytokine polypeptide or a functional fragment or a functional variant thereof; the C-terminus of the first polypeptide chain is linked to the second cytokine polypeptide or a functional fragment or a functional variant thereof; or a combination thereof; and (b-2) the N-terminus of the third polypeptide chain is linked to the fifth cytokine polypeptide or a functional fragment or a functional variant thereof; the C-terminus of the third polypeptide chain is linked to the sixth cytokine polypeptide or a functional fragment or a functional variant thereof; or a combination thereof; or (c-1) the N-terminus of the second polypeptide chain is linked to the third cytokine polypeptide or a functional fragment or a functional variant thereof; the C-terminus of the second polypeptide chain is linked to the fourth cytokine polypeptide or a functional fragment or a functional variant thereof, or a combination thereof; and (c-2) the N-terminus of the third polypeptide chain is linked to the fifth cytokine polypeptide or a functional fragment or a functional variant thereof; the C-terminus of the third polypeptide chain is linked to the sixth cytokine polypeptide or a functional fragment or a functional variant thereof; or a combination thereof.

[0627] In some embodiments. (1) the N-terminus of the first polypeptide chain is linked to the first cytokine polypeptide or a functional fragment or a functional variant thereof; the C-terminus of the first polypeptide chain is linked to the second cytokine polypeptide or a functional fragment or a functional variant thereof; or a combination thereof; (2) the N-terminus of the second polypeptide chain is linked to the third cytokine polypeptide or a functional fragment or a functional variant thereof; the C-terminus of the second polypeptide chain is linked to the fourth cytokine polypeptide or a functional fragment or a functional variant thereof; or a combination thereof; and (3) the N-terminus of the third polypeptide chain is linked to the fifth cytokine polypeptide or a functional fragment or a functional variant thereof; the C-terminus of the third polypeptide chain is linked to the sixth cytokine polypeptide or a functional fragment or a functional variant thereof; or a combination thereof.

[0628] In some embodiments, the first cytokine polypeptide, the second cytokine polypeptide, or a combination thereof is within a single contiguous polypeptide chain of the first polypeptide chain, the third cytokine polypeptide, the fourth cytokine polypeptide, or a combination thereof is within a single contiguous polypeptide chain of the second polypeptide chain, the fifth cytokine polypeptide, the sixth cytokine polypeptide, or a combination thereof is within a single contiguous polypeptide chain of the third polypeptide chain, or a combination thereof.

[0629] In some embodiments, the multifunctional polypeptide molecule as described herein further comprises a linker between the first portion of the first TCRβV-binding moiety and the first dimerization module, a linker between the first portion of the second TCRβV-binding moiety and the second dimerization module, a linker between the first VH and the first CH1, a linker between the first VL and the first CL, a linker between the second VH and the second CH1, a linker between the second VL and the second CL, a linker between the at least one cytokine polypeptide or a functional fragment or a functional variant thereof and the first polypeptide chain, a linker between the at least one cytokine polypeptide or a functional fragment or a functional variant thereof and the second polypeptide chain, a linker between the at least one cytokine polypeptide or a functional fragment or a functional variant thereof and the third polypeptide chain, a linker between the at least one cytokine polypeptide or a functional fragment or a functional variant thereof and the fourth polypeptide chain, or a combination thereof.

[0630] In some embodiments, the multifunctional polypeptide molecule as described herein further comprises comprising a linker between the first portion of the first TCRβV-binding moiety and the first dimerization module, a linker between the first VH and the first CH1, a linker between the first VL and the first CL, a linker between the at least one cytokine polypeptide or a functional fragment or a functional variant thereof and the first polypeptide chain, a linker between the at least one cytokine polypeptide or a functional fragment or a functional variant thereof and the second polypeptide chain, a linker between the at least one cytokine polypeptide or a functional fragment or a functional variant thereof and the third polypeptide chain, or a combination thereof. In some embodiments, linker is selected from the group consisting of a cleavable linker, a non-cleavable linker, a peptide linker, a flexible linker, a rigid linker, a helical linker, and a non-helical linker. In some embodiments, the linker is the peptide linker and wherein the linker is a GS linker. In some embodiments, the linker is the peptide linker and wherein the linker comprises the sequence of SEQ ID NO: 3308 or SEQ ID NO: 3643.

[0631] Described herein, in certain embodiments, is a multifunctional polypeptide molecule comprising a first polypeptide chain, a second polypeptide chain, a third polypeptide chain, a fourth polypeptide chain, a first cytokine polypeptide or a functional fragment or a functional variant thereof, and a second cytokine polypeptide or a functional fragment or a functional variant thereof, wherein the first polypeptide chain, the second polypeptide chain, the third polypeptide chain, and the fourth polypeptide chain are non-contiguous, wherein: (i) the first polypeptide chain comprising a first portion of a first TCRβV-binding moiety and a first dimerization module linked to the first portion of the first TCRβV-binding moiety; (ii) the second polypeptide chain comprising a second portion of the first TCRβV-binding moiety; (iii) the third polypeptide chain comprising a first portion of a second TCRβV-binding moiety and a second dimerization module linked to the first portion of the second TCRβV-binding moiety; and (iv) the fourth polypeptide chain comprising a second portion of the second TCRβV-binding moiety; and wherein the first cytokine polypeptide or a functional fragment or a functional variant thereof is covalently linked to the C-terminus of the second polypeptide chain, and the second cytokine polypeptide or a functional fragment or a functional variant thereof is covalently linked to the C-terminus of the fourth polypeptide chain.

[0632] Described herein, in certain embodiments, is a multifunctional polypeptide molecule comprising a first polypeptide chain, a second polypeptide chain, a third polypeptide chain, a fourth polypeptide chain, a cytokine polypeptide or a functional fragment or a functional variant thereof, wherein the first polypeptide chain, the second polypeptide chain, the third poly peptide chain, and the fourth polypeptide chain are non-contiguous, wherein: (i) the first polypeptide chain comprising a first portion of a first TCRβV-binding moiety and a first dimerization module linked to the first portion of the first TCRβV-binding moiety; (ii) the second polypeptide chain comprising a second portion of the first TCRβV-binding moiety; (iii) the third polypeptide chain comprising a first portion of a second TCRβV-binding moiety and a second dimerization module linked to the first portion of the second TCRβV-binding moiety; and (iv) the fourth polypeptide chain comprising a second portion of the second TCRβV-binding moiety; and wherein the cytokine polypeptide or a functional fragment or a functional variant thereof is covalently linked to the C-terminus of the second polypeptide chain or the C-terminus of the fourth polypeptide chain.

[0633] Described herein, in certain embodiments, is a multifunctional polypeptide molecule comprising a first polypeptide chain, a second polypeptide chain, a third polypeptide chain, a fourth polypeptide chain, a cytokine polypeptide or a functional fragment or a functional variant thereof, wherein the first polypeptide chain, the second polypeptide chain, the third polypeptide chain, and the fourth polypeptide chain are non-contiguous, wherein: (i) the first polypeptide chain comprising a first portion of a first TCRβV-binding moiety and a first dimerization module linked to the first portion of the first TCRβV-binding moiety; (ii) the second polypeptide chain comprising a second portion of the first TCRβV-binding moiety; (iii) the third polypeptide chain comprising a first portion of a second TCRβV-binding moiety and a second dimerization module linked to the first portion of the second TCRβV-binding moiety; and (iv) the fourth polypeptide chain comprising a second portion of the second TCRβV-binding moiety; and wherein the cytokine polypeptide or a functional fragment or a functional variant thereof is covalently linked to the C-terminus of the first polypeptide chain or the C-terminus of the third polypeptide chain.

[0634] Described herein, in certain embodiments, is a multifunctional polypeptide molecule comprising a first polypeptide chain, a second polypeptide chain, a third polypeptide chain, and a cytokine polypeptide or a functional fragment or a functional variant thereof, wherein the first polypeptide chain, the second polypeptide chain, and the third polypeptide chain are non-contiguous, wherein: (i) the first polypeptide chain comprising a first portion of a first TCRβV-binding moiety and a first dimerization module linked to the first portion of the first TCRβV-binding moiety; (ii) the second polypeptide chain comprising a second portion of the first TCRβV-binding moiety; and (iii) the third polypeptide chain comprising a second dimerization module: wherein the at least one cytokine polypeptide or a functional fragment or a functional variant thereof is covalently linked to the N terminus of the third polypeptide chain; and wherein the multifunctional polypeptide molecule does not comprise an additional TCRβV-binding moiety except the first TCRβV-binding moiety.

[0635] In some embodiments, the first portion of the first TCRβV-binding moiety comprises a first VH and a first CH1 linked to the first VH. In some embodiments, the first CH1 is linked to the C-terminus of the first VH.

[0636] In some embodiments, the second portion of the first TCRβV-binding moiety comprises a first VL and a first CL linked to the first VL. In some embodiments, first CL is linked to the C-terminus of the first VL.

[0637] In some embodiments, the first dimerization module is linked to the first portion of the first TCRβV-binding moiety. In some embodiments, the first dimerization module is linked to the C-terminus of the first portion of the first TCRβV-binding moiety. In some embodiments, the first portion of the second TCRβV-binding moiety comprises a second VH and a second CH1 linked to the second VH. In some embodiments, the second CH1 is linked to the C-terminus of the second VH. In some embodiments, the second portion of the second TCRβV-binding moiety comprises a second VL and a second CL linked to the second VL. In some embodiments, the second CL is linked to the C-terminus of the second VL. In some embodiments, the second dimerization module is linked to the first portion of the second TCRβV-binding moiety. In some embodiments, the second dimerization module is linked to the C-terminus of the first portion of the second TCRβV-binding moiety.

[0638] In some embodiments, the multifunctional polypeptide molecule as described herein further comprises a linker between the first portion of the first TCRβV-binding moiety and the first dimerization module, a linker between the first portion of the second TCRβV-binding moiety and the second dimerization module, a linker between the first VH and the first CH1, a linker between the first VL and the first CL, a linker between the second VH and the second CH1, a linker between the second VL and the second CL, a linker between the at least one cytokine polypeptide or a functional fragment or a functional variant thereof and the first polypeptide chain, a linker between the at least one cytokine polypeptide or a functional fragment or a functional variant thereof and the second polypeptide chain, a linker between the at least one cytokine polypeptide or a functional fragment or a functional variant thereof and the third polypeptide chain, a linker between the at least one cytokine polypeptide or a functional fragment or a functional variant thereof and the fourth polypeptide chain, or a combination thereof. In some embodiments, the multifunctional polypeptide molecule as described herein further comprises a linker between the first portion of the first TCRβV-binding moiety and the first dimerization module, a linker between the first VH and the first CH1, a linker between the first VL and the first CL, a linker between the at least one cytokine polypeptide or a functional fragment or a functional variant thereof and the third polypeptide chain, or a combination thereof. In some embodiments, linker is selected from the group consisting of a cleavable linker, a non-cleavable linker, a peptide linker, a flexible linker, a rigid linker, a helical linker, and a non-helical linker. In some embodiments, the linker is the peptide linker and wherein the linker is a GS linker. In some embodiments, the linker is the peptide linker and wherein the linker comprises the sequence of SEQ ID NO: 3308 or SEQ ID NO: 3643.

[0639] In some embodiments, the first TCRβV-binding moiety, the second TCRβV-binding moiety, or a combination thereof comprises any one selected from the group consisting of a Fab, F(ab′) 2, Fv, a single chain Fv (scFv), a single domain antibody, a diabody (dAb), a camelid antibody and a combination thereof. In some embodiments, the first TCRβV-binding moiety, the second TCRβV-binding moiety, or a combination thereof comprises a scFv or a Fab.

[0640] In some embodiments, the multifunctional polypeptide molecule does not comprise an additional antigen-binding moiety except the TCRβV-binding moiety. In some embodiments, the multifunctional polypeptide molecule further comprise an additional antigen-binding moiety that is not the TCRβV-binding moiety.

[0641] Described herein, in certain embodiments, is a multifunctional polypeptide molecule comprising a first poly peptide chain, a second polypeptide chain, and at least one cytokine poly peptide or a functional fragment or a functional variant thereof, wherein the first polypeptide chain and the second polypeptide chain are non-contiguous, wherein: (i) the first polypeptide chain comprising a first TCRβV-binding moiety and a first dimerization module linked to the C-terminus of the first TCRβV-binding moiety, wherein the first TCRβV-binding moiety comprises a first VL and a first VH; and (ii) the second polypeptide chain comprising a second TCRβV-binding moiety and a second dimerization module linked to the C-terminus of the second TCRβV-binding moiety: wherein the at least one cytokine polypeptide or a functional fragment or a functional variant thereof is covalently linked to the first polypeptide chain, the second polypeptide chain, or a combination thereof; wherein the first TCRβV-binding moiety, the second TCRβV-binding moiety, or a combination thereof comprises a scFv; and wherein the multifunctional polypeptide molecule does not comprise an additional antigen-binding moiety except the first TCRβV-binding moiety and the second TCRβV-binding moiety.

[0642] Described herein, in certain embodiments, is a multifunctional polypeptide molecule comprising a first polypeptide chain, a second polypeptide chain, and at least one cytokine polypeptide or a functional fragment or a functional variant thereof, wherein the first polypeptide chain and the second polypeptide chain are non-contiguous, wherein: (i) the first polypeptide chain comprising a first TCRβV-binding moiety and a first dimerization module linked to the C-terminus of the first TCRβV-binding moiety, wherein the first TCRβV-binding moiety comprises a first VL and a first VH; and (ii) the second polypeptide chain comprising a second dimerization module: wherein the at least one cytokine polypeptide or a functional fragment or a functional variant thereof is covalently linked to the first polypeptide chain, the second polypeptide chain, or a combination thereof; wherein the first TCRβV-binding moiety comprises a scFv: wherein the multifunctional poly peptide molecule does not comprise an additional antigen-binding moiety except the first TCRβV-binding moiety; and wherein the multifunctional polypeptide molecule does not comprise an additional TCRβV-binding moiety except the first TCRβV-binding moiety.

[0643] In some embodiments, (a) the N-terminus of the first polypeptide chain is linked to a first cytokine polypeptide or a functional fragment or a functional variant thereof; the C-terminus of the first polypeptide chain is linked to a second cytokine polypeptide or a functional fragment or a functional variant thereof; or a combination thereof; (b) the N-terminus of the second polypeptide chain is linked to a third cytokine polypeptide or a functional fragment or a functional variant thereof; the C-terminus of the second polypeptide chain is linked to a fourth cytokine polypeptide or a functional fragment or a functional variant thereof; or a combination thereof; or (e) a combination thereof.

[0644] In some embodiments, the first cytokine polypeptide, the second cytokine polypeptide, or a combination thereof is within a single contiguous polypeptide chain of the first polypeptide chain, the third cytokine polypeptide, the fourth cytokine polypeptide, or a combination thereof is within a single contiguous polypeptide chain of the second polypeptide chain, or a combination thereof.

[0645] In some embodiments, the multifunctional polypeptide molecule as described herein further comprises a linker between the first TCRβV-binding moiety and the first dimerization module, a linker between the second TCRβV-binding moiety and the second dimerization module, a linker between the at least one cytokine polypeptide or a functional fragment or a functional variant thereof and the first polypeptide chain, a linker between the at least one cytokine polypeptide or a functional fragment or a functional variant thereof and the second polypeptide chain, or a combination thereof.

[0646] In some embodiments, the multifunctional polypeptide molecule as described herein further comprises a linker between the first TCRβV-binding moiety and the first dimerization module, a linker between the at least one cytokine polypeptide or a functional fragment or a functional variant thereof and the first polypeptide chain, a linker between the at least one cytokine polypeptide or a functional fragment or a functional variant thereof and the second polypeptide chain, or a combination thereof. In some embodiments, the linker is selected from the group consisting of a cleavable linker, a non-cleavable linker, a peptide linker, a flexible linker, a rigid linker, a helical linker, and a non-helical linker. In some embodiments, the linker is the peptide linker and wherein the linker is a GS linker. In some embodiments, the linker is the peptide linker and wherein the linker comprises the sequence of SEQ ID NO: 3308 or SEQ ID NO: 3643.

[0647] In some embodiments, the multifunctional polypeptide molecule comprises at least two of the cytokine polypeptide. In some embodiments, the multifunctional polypeptide molecule comprises at least three of the cytokine polypeptide. In some embodiments, the multifunctional polypeptide molecule comprises at least four of the cytokine polypeptide. In some embodiments, the multifunctional polypeptide molecule comprises at least five of the cytokine polypeptide. In some embodiments, the multifunctional polypeptide molecule comprises at least six of the cytokine polypeptide. In some embodiments, the multifunctional polypeptide molecule comprises at least seven of the cytokine polypeptide. In some embodiments, the multifunctional polypeptide molecule comprises at least eight of the cytokine polypeptide. In some embodiments, the multifunctional polypeptide molecule comprises two of the cytokine polypeptide. In some embodiments, the multifunctional polypeptide molecule comprises three of the cytokine polypeptide. In some embodiments, the multifunctional polypeptide molecule comprises four of the cytokine polypeptide. In some embodiments, the multifunctional polypeptide molecule comprises five of the cytokine polypeptide. In some embodiments, the multifunctional polypeptide molecule comprises six of the cytokine polypeptide. In some embodiments, the multifunctional polypeptide molecule comprises seven of the cytokine polypeptide. In some embodiments, the multifunctional polypeptide molecule comprises eight of the cytokine polypeptide. In some embodiments, the multifunctional polypeptide molecule comprises two of the cytokine polypeptide, each of which is linked to the first polypeptide chain and the second polypeptide chain: the first polypeptide chain and the third polypeptide chain; the first polypeptide chain and the fourth polypeptide chain; the second and the third polypeptide chain: the second polypeptide chain and the fourth polypeptide chain; or the third polypeptide chain and the fourth polypeptide chain, respectively. In some embodiments, the multifunctional polypeptide molecule comprises three of the cytokine polypeptide, each of which is linked to the first polypeptide chain, the second polypeptide chain, and the third polypeptide chain; the first polypeptide chain, the second polypeptide chain, and the fourth poly peptide chain: the first poly peptide chain, the third polypeptide chain, and the fourth polypeptide chain; or the second polypeptide chain, the third polypeptide chain, and the fourth polypeptide chain, respectively. In some embodiments, the multifunctional polypeptide molecule comprises four of the cytokine polypeptide, each of which is linked to the first polypeptide chain, the second polypeptide chain, the third polypeptide chain, and the fourth polypeptide chain, respectively. In some embodiments, the cytokine polypeptide is not linked to the polypeptides that comprise the first TCRβV-binding moiety.

[0648] In some embodiments, the at least one cytokine polypeptide is selected from the group consisting of interleukin-2 (IL-2) or a fragment or a functional fragment or a functional variant thereof, interleukin-7 (IL-7) or a fragment or a functional fragment or a functional variant thereof, interleukin-12 (IL-12) or a fragment or a functional fragment or a functional variant thereof, interleukin-15 (IL-15) or a fragment or a functional fragment or a functional variant thereof, interleukin-18 (IL-18) or a fragment or a functional fragment or a functional variant thereof, interleukin-21 (IL-21) or a fragment or a functional fragment or a functional variant thereof, or interferon gamma or a fragment or a functional fragment or a functional variant thereof, or a combination thereof.

[0649] In some embodiments, the at least one cytokine polypeptide comprises interleukin-2 (IL-2) or a fragment thereof. In some embodiments, the at least one cytokine polypeptide is interleukin-2 (IL-2) or a fragment thereof. In some embodiments, the at least one cytokine polypeptide comprises a sequence having at least 75%, 80%, 85%, 90%, 95%, 99%, 99.5%, 99.9%, or 100% sequence identity to the sequence of SEQ ID NO: 2191. In some embodiments, the at least one cytokine polypeptide comprises the sequence of SEQ ID NO: 2191. In some embodiments, the sequence of the at least one cytokine polypeptide is a sequence having at least 75%, 80%, 85%, 90%, 95%, 99%, 99.5%, 99.9%, or 100% sequence identity to the sequence of SEQ ID NO: 2191. In some embodiments, the sequence of the at least one cytokine polypeptide is the sequence of SEQ ID NO: 2191.

[0650] In some embodiments, the variant of the at least one cytokine polypeptide comprises an IL-2 variant comprising a mutation. In some embodiments, the mutation comprises an insertion mutation, a deletion mutation, or a substitution mutation. In some embodiments, the mutation comprises the substitution mutation. In some embodiments, the variant comprises an IL-2 variant comprising C125A mutation. In some embodiments, the variant of the at least one cytokine polypeptide is an IL-2 variant comprising a mutation. In some embodiments, the mutation is an insertion mutation, a deletion mutation, or a substitution mutation. In some embodiments, the mutation is the substitution mutation. In some embodiments, the variant is an IL-2 variant comprising C125A mutation. In some embodiments, the variant comprises a sequence having at least 75%, 80%, 85%, 90%, 95%, 99%, 99.5%, 99.9%, or 100% sequence identity to the sequence of SEQ ID NO: 2270. In some embodiments, the variant comprises the sequence of SEQ ID NO: 2270. In some embodiments, the sequence of the variant is a sequence having at least 75%, 80%, 85%, 90%, 95%, 99%, 99.5%, 99.9%, or 100% sequence identity to the sequence of SEQ ID NO: 2270. In some embodiments, the sequence of the variant is the sequence of SEQ ID NO: 2270.

[0651] In some embodiments, the first dimerization module comprises a first immunoglobulin constant regions (Fc regions) and the second dimerization module comprises a second Fc region. In some embodiments, the first dimerization module is a first immunoglobulin constant regions (Fc regions) and the second dimerization module is a second Fc region.

[0652] In some embodiments, the first Fc region, the second Fc region, or a combination thereof is selected from an IgG1 Fc region or a fragment thereof, an IgG2 Fc region or a fragment thereof, an IgG3 Fc region or a fragment thereof, an IgGA1 Fc region or a fragment thereof, an IgGA2 Fc region or a fragment thereof, an IgG4 Fc region or a fragment thereof, an IgJ Fc region or a fragment thereof, an IgM Fc region or a fragment thereof, an IgD Fc region or a fragment thereof, and an IgE Fc region or a fragment thereof.

[0653] In some embodiments, the first Fc region, the second Fc region, or a combination thereof is selected from a human IgG1 Fc region or a fragment thereof, a human IgG2 Fc region or a fragment thereof, and a human IgG4 Fc region or a fragment thereof.

[0654] In some embodiments, the first Fc region, the second Fc region, or a combination thereof comprises an Fc interface with one or more of, a paired cavity-protuberance, an electrostatic interaction, or a strand-exchange, wherein the dimerization of the first Fc region and the second Fc region is enhanced as indicated by a greater ratio of heteromultimer:homomultimer forms relative to a dimerization of Fc regions with a non-engineered interface. In some embodiments, the dimerization of the first Fc region and the second Fc region is enhanced at least by 1.1 fold, 1.2 fold, 1.3 fold, 1.4 fold, 1.5 fold, 1.6 fold, 1.7 fold, 1.8 fold, 1.9 fold, 2 fold, 3 fold, 4 fold, 5 fold, 6 fold, 7 fold, 8 fold, 9 fold, 10 fold, 15 fold, 20 fold, 25 fold, 30 fold, 35 fold, 40 fold. 45 fold, 50 fold, 55 fold, 60 fold, 65 fold, 70 fold, 75 fold, 80 fold, 85 fold, 90 fold, 95 fold, 100 fold, 150 fold, 200 fold, 250 fold, 300 fold, 250 fold, 400 fold, 450 fold, 500 fold, 550 fold, 600 fold, 650 fold, 700 fold, 750 fold, 800 fold, 850 fold, 900 fold, 950 fold, 1000 fold, 2000 fold, 3000 fold, 4000 fold, 5000 fold, 6000 fold, 7000 fold, 8000 fold, 9000 fold, or 10000 fold relative to a dimerization of Fc regions with a non-engineered interface. In some embodiments, the dimerization of the first Fc region and the second Fc region is enhanced at most by 1.1 fold, 1.2 fold, 1.3 fold, 1.4 fold, 1.5 fold, 1.6 fold, 1.7 fold, 1.8 fold, 1.9 fold, 2 fold. 3 fold, 4 fold, S fold, 6 fold, 7 fold, 8 fold, 9 fold, 10 fold, 15 fold, 20 fold, 25 fold, 30 fold, 35 fold, 40 fold, 45 fold, 50 fold, 55 fold, 60 fold, 65 fold, 70 fold, 75 fold, 80 fold, 85 fold, 90 fold, 95 fold, 100 fold, 150 fold, 200 fold, 250 fold, 300 fold, 250 fold, 400 fold, 450 fold, 500 fold, 550 fold, 600 fold, 650 fold, 700 fold, 750 fold, 800 fold, 850 fold, 900 fold, 950 fold, 1000 fold, 2000 fold, 3000 fold, 4000 fold, 5000 fold, 6000 fold, 7000 fold, 8000 fold, 9000 fold, or 10000 fold relative to a dimerization of Fc regions with a non-engineered interface. In some embodiments, the dimerization of the first Fc region and the second Fc region is enhanced by 1.1 fold, 1.2 fold, 1.3 fold, 1.4 fold, 1.5 fold, 1.6 fold, 1.7 fold, 1.8 fold, 1.9 fold, 2 fold, 3 fold, 4 fold, 5 fold, 6 fold, 7 fold, 8 fold, 9 fold, 10 fold, 15 fold, 20 fold, 25 fold, 30 fold, 35 fold, 40 fold, 45 fold, 50 fold, 55 fold, 60 fold, 65 fold, 70 fold, 75 fold, 80 fold, 85 fold, 90 fold, 95 fold, 100 fold, 150 fold, 200 fold, 250 fold, 300 fold, 250 fold, 400 fold, 450 fold, 500 fold, 550 fold, 600 fold, 650 fold, 700 fold, 750 fold, 800 fold, 850 fold, 900 fold, 950 fold, 1000 fold, 2000 fold, 3000 fold, 4000 fold, 5000 fold, 6000 fold, 7000 fold, 8000 fold, 9000 fold, or 10000 fold relative to a dimerization of Fc regions with a non-engineered interface.

[0655] In some embodiments, the first Fc region, the second Fc region, or a combination thereof comprises an amino acid substitution listed in Table 14.

[0656] In some embodiments, the first Fc region, the second Fc region, or a combination thereof comprises an Asn297Ala (N297A) mutation or a Leu234Ala/Leu235Ala (LALA) mutation.

[0657] In some embodiments, the first Fc region, the second Fc region, or a combination thereof comprises a sequence having at least 75%, 80%, 85%, 90%, 95%, 99%, 99.5%, 99.9%, or 100% sequence identity to the sequence of SEQ ID NO: 40, SEQ ID NO: 42, SEQ ID NO: 3645, SEQ ID NO: 3646, SEQ ID NO: 3647, SEQ ID NO:3648, or SEQ ID NO: 3649. In some embodiments, the first Fc region, the second Fc region, or a combination thereof comprises the sequence of SEQ ID NO: 40, SEQ ID NO: 42, SEQ ID NO: 3645, SEQ ID NO: 3646, SEQ ID NO: 3647, SEQ ID NO:3648, or SEQ ID NO. 3649.

[0658] In some embodiments, the sequence of the first Fc region, the second Fc region, or a combination thereof is a sequence having at least 75%, 80%, 85%, 90%, 95%, 99%, 99.5%, 99.9%, or 100% sequence identity to the sequence of SEQ ID NO: 40, SEQ ID NO: 42, SEQ ID NO: 3645, SEQ ID NO: 3646, SEQ ID NO: 3647, SEQ ID NO:3648, or SEQ ID NO: 3649. In some embodiments, the sequence of the first Fc region, the second Fc region, or a combination thereof is the sequence of SEQ ID NO: 40, SEQ ID NO: 42. SEQ ID NO: 3645, SEQ ID NO: 3646, SEQ ID NO: 3647, SEQ ID NO:3648, or SEQ ID NO: 3649.

[0659] In some embodiments, the first TCRβV-binding moiety, the second TCRβV-binding moiety, or a combination thereof binds to one or more of a TCRβV subfamily selected from the group consisting of: (i) TCRβ V2 subfamily comprising TCRβ V2*01; (ii) TCRβ V3 subfamily comprising TCRβ V3-1*01; (iii) TCRβ V4 subfamily comprising one or more selected from TCRβ V4-1, TCRβ V4-2, and TCRβ V4-3; (iv) TCRβ V5 subfamily comprising one or more selected from TCRβ V5-6*01, TCRβ V5-4*01, TCRβ V5-1*01, and TCRβ V5-8*01; (v) the TCRβ V6 subfamily comprising one or more selected from TCRβ V6-4*01. TCRβ V6-4*02, TCRβ V6-9*01, TCRβ V6-8*01, TCRβ V6-5*01, TCRβ V6-6*02, TCRβ V6-6*01, TCRβ V6-2*01, TCRβ V6-3*01, and TCRβ V6-1*01; (vi) TCRβ V9 subfamily; (vii) TCRβ V10 subfamily comprising one or more selected from TCRβ V10-1*01, TCRβ V10-J*02, TCRβ V10-3*01, and TCRβ V10-2*01; (viii) TCRβ V11 subfamily comprising TCRβ V11-2; (ix) TCRβ V12 subfamily comprising one or more selected from TCRβ V12-4*01, TCRβ V12-3*01, and TCRβ V12-5*01; (x) TCRβ V13 subfamily comprising TCRβ V13*01; (xi) TCRβ V16 subfamily comprising TCRβ V16*01; (xii) TCRβ V19 subfamily comprising one or more selected from TCRβ V19*01 and TCRβ V19*02; (xiii) TCRβ V21 subfamily. (xiv) TCRβ V23 subfamily. (xv) TCRβ V27 subfamily; and (xvi) TCRβ V28 subfamily.

[0660] In some embodiments, the first TCRβV-binding moiety and the second TCRβV-binding moiety are same. In some embodiments, the first TCRβV-binding moiety and the second TCRβV-binding moiety are different.

[0661] In some embodiments, the first TCRβV-binding moiety and the second TCRβV-binding moiety binds: (i) one or more of a TCRβ V6 subfamily member and one or more of a TCRβ V10 subfamily member, respectively; (ii) one or more of a TCRβ V6 subfamily member and one or more of a TCRβ V5 subfamily member, respectively; (iii) one or more of a TCRβ V6 subfamily member and one or more of a TCRβ V12 subfamily member, respectively; (iv) one or more of a TCRβ V10 subfamily member and one or more of a TCRβ V5 subfamily member, respectively; (v) one or more of a TCRβ V10 subfamily member and one or more of a TCRβ V12 subfamily member, respectively; or (vi) one or more of a TCRβ V5 subfamily member and one or more of a TCRβ V12 subfamily member, respectively.

[0662] In some embodiments, the first TCRβV-binding moiety, the second TCRβV-binding moiety, or a combination thereof comprises: (i) a HC CDR1, a HC CDR2 and a HC CDR3 of an amino acid sequence having at least 75%, 80%, 85%, 90%, 95%, 99%, 99.5%, 99.9%, or 100% sequence identity to any one of the CDR1, CDR2, and CDR3 sequences listed in Table 1; (ii) a LC CDR1, a LC CDR2, and a LC CDR3 of an amino acid sequence having at least 75%, 80%, 85%, 90%, 95%, 99%, 99.5%, 99.9%, or 100% sequence identity to any one of the CDR1, CDR2, and CDR3 the sequences listed in Table 1; or (iii) a combination thereof. In some embodiments, the first TCRβV-binding moiety, the second TCRβV-binding moiety, or a combination thereof comprises: (i) a HC CDR1, a HC CDR2 and a HC CDR3 having any one of the CDR1, CDR2, and CDR3 sequences listed in Table 1; (ii) a LC CDR1, a LC CDR2, and a LC CDR3 having any one of the CDR1, CDR2, and CDR3 the sequences listed in Table 1; or (ii) a combination thereof.

[0663] In some embodiments, the first TCRβV-binding moiety, the second TCRβV-binding moiety, or a combination thereof comprises: (i) a HC CDR1, a HC CDR2 and a HC CDR3 of an amino acid sequence having at least 75%, 80%, 85%, 90%, 95%, 99%, 99.5%, 99.9%, or 100% sequence identity to any one of the CDR1, CDR2, and CDR3 sequences listed in Table 1, respectively; (ii) a LC CDR1, a LC CDR2, and a LC CDR3 of an amino acid sequence having at least 75%, 80%, 85%, 90%, 95%, 99%, 99.5%, 99.9%, or 100% sequence identity to any one of the CDR1, CDR2, and CDR3 the sequences listed in Table 1, respectively; or (iii) a combination thereof. In some embodiments, the first TCRβV-binding moiety, the second TCRβV-binding moiety, or a combination thereof comprises: (i) a HC CDR1, a HC CDR2 and a HC CDR3 having any one of the CDR1, CDR2, and CDR3 sequences listed in Table 1, respectively; (ii) a LC CDR1, a LC CDR2, and a LC CDR3 having any one of the CDR1, CDR2, and CDR3 the sequences listed in Table 1, respectively; or (iii) a combination thereof.

[0664] In some embodiments, the first TCRβV-binding moiety, the second TCRβV-binding moiety, or a combination thereof comprises: (i) a VH comprising a framework region (FR) comprising a framework 1 (FR1), a framework region 2 (FR2), a framework region 3 (FR3), and a framework region 4 (FR4) that have at least 75%, 80%, 85%, 90%, 95%, 99%, 99.5%, 99.9%, or 100% sequence identity with a non-murine germline FR1, a non-murine germline FR2, a non-murine germline FR3, and a non-murine germline FR4; (ii) a VL comprising a FR comprising a FR1, a FR2, a FR3, and a FR4 that have at least 75%, 80%, 85%, 90%, 95%, 99%, 99.5%, 99.9%, or 100% sequence identity with a non-murine germline FR1, a non-murine germline FR2, a non-murine germline FR3, and a non-murine germline FR4; or (iii) a combination thereof. In some embodiments, the first TCRβV-binding moiety, the second TCRβV-binding moiety, or a combination thereof comprises: (i) a VH comprising a FR comprising a FR1, a FR2, a FR3, and a FR4 having the sequences of a non-murine germline FR1, a non-murine germline FR2, a non-murine germline FR3, and a non-murine germline FR4; (ii) a VL comprising a FR comprising a FR1, a FR2, a FR3, and a FR4 having the sequences of a non-murine germline FR1, a non-murine germline FR2, a non-murine germline FR3, and a non-murine germline FR4; or (iii) a combination thereof.

[0665] In some embodiments, the first TCRβV-binding moiety, the second TCRβV-binding moiety, or a combination thereof comprises: (i) a VH comprising a FR1, a FR2, a FR3, and a FR4 that have at least 75%, 80%, 85%, 90%, 95%, 99%, 99.5%, 99.9%, or 100% sequence identity with a non-murine germline FR1, a non-murine germline FR2, a non-murine germline FR3, and a non-murine germline FR4, respectively; (ii) a VL comprising a FR comprising a FR1, a FR2, a FR3, and a FR4 that have at least 75%, 80%, 85%, 90%, 95%, 99%, 99.5%, 99.9%, or 100% sequence identity with a non-murine germline FR1, a non-murine germline FR2, a non-murine germline FR3, and a non-murine germline FR4, respectively; or (iii) a combination thereof. In some embodiments, the first TCRβV-binding moiety, the second TCRβV-binding moiety, or a combination thereof comprises: (i) a VH comprising a FR comprising a FR1, a FR2, a FR3, and a FR4 having the sequences of a non-murine germline FR1, a non-murine germline FR2, a non-murine germline FR3, and a non-murine germline FR4, respectively; (ii) a VL comprising a FR comprising a FR1, a FR2, a FR3, and a FR4 having the sequences of a non-murine germline FR1, a non-murine germline FR2, a non-murine germline FR3, and a non-murine germline FR4, respectively; or (iii) a combination thereof.

[0666] In some embodiments, the VH comprises the FR3 comprising (i) a Threonine at position 73 according to Kabat numbering; (ii) a Glycine a position 94 according to Kabat numbering; or (iii) a combination thereof. In some embodiments, the VL comprises the FR1 comprising a Phenylalanine at position 10 according to Kabat numbering. In some embodiments, the VL comprises the FR2 comprising (i) a Histidine at position 36 according to Kabat numbering; (ii) an Alanine at position 46 according to Kabat numbering; or (iii) a combination thereof. In some embodiments, the VL comprises the FR3 comprising a Phenylalanine at position 87 according to Kabat numbering.

[0667] In some embodiments, the first TCRβV-binding moiety, the second TCRβV-binding moiety, or a combination thereof comprises: (i) a HC CDR1, a HC CDR2 and a HC CDR3 of an amino acid sequence having at least 75%, 80%, 85%, 90%, 95%, 99%, 99.5%, 99.9%, or 100% sequence identity to any one of the CDR1, CDR2, and CDR3 sequences listed in Table 2; (ii) a LC CDR1, a LC CDR2, and a LC CDR3 of an amino acid sequence having at least 75%, 80%, 85%, 90%, 95%, 99%, 99.5%, 99.9%, or 100% sequence identity to any one of the CDR1, CDR2, and CDR3 sequences listed in Table 2; or (iii) a combination thereof. In some embodiments, the first TCRβV-binding moiety, the second TCRβV-binding moiety, or a combination thereof comprises: (i) a HC CDR1, a HC CDR2 and a HC CDR3 having any one of the CDR1, CDR2, and CDR3 sequences listed in Table 2; (ii) a LC CDR1, a LC CDR2, and a LC CDR3 having any one of the CDR1, CDR2, and CDR3 sequences listed in Table 2; or (iii) a combination thereof.

[0668] In some embodiments, the first TCRβV-binding moiety, the second TCRβV-binding moiety, or a combination thereof comprises: (i) a HC CDR1, a HC CDR2 and a HC CDR3 of an amino acid sequence having at least 75%, 80%, 85%, 90%, 95%, 99%, 99.5%, 99.9%, or 100% sequence identity to any one of the CDR1, CDR2, and CDR3 sequences listed in Table 2, respectively. (ii) a LC CDR1, a LC CDR2, and a LC CDR3 of an amino acid sequence having at least 75%, 80%, 85%, 90%, 95%, 99%, 99.5%, 99.9%, or 100% sequence identity to any one of the CDR1, CDR2, and CDR3 sequences listed in Table 2, respectively; or (iii) a combination thereof. In some embodiments, the first TCRβV-binding moiety, the second TCRβV-binding moiety, or a combination thereof comprises: (i) a HC CDR1, a HC CDR2 and a HC CDR3 having any one of the CDR1, CDR2, and CDR3 sequences listed in Table 2, respectively; (ii) a LC CDR1, a LC CDR2, and a LC CDR3 having any one of the CDR1, CDR2, and CDR3 sequences listed in Table 2, respectively; or (iii) a combination thereof.

[0669] In some embodiments, the first TCRβV-binding moiety, the second TCRβV-binding moiety, or a combination thereof comprises: (i) a VH comprising a FR comprising a FR1, a FR2, a FR3, and a FR4 that have at least 75%, 80%, 85%, 90%, 95%, 99%, 99.5%, 99.9%, or 100% sequence identity with a FR1, a FR2, a FR3, and a FR4 of a humanized B-H LC of Table 2; (ii) a VL comprising a FR comprising a FR1, a FR2, a FR3, and a FR4 that have at least 75%, 80%, 85%, 90%, 95%, 99%, 99.5%, 99.9%, or 100% sequence identity with a FR1, a FR2, a FR3, and a FR4 of a humanized B-H LC of Table 2; or (iii) a combination thereof. In some embodiments, the first TCRβV-binding moiety, the second TCRβV-binding moiety, or a combination thereof comprises: (i) a VH comprising a FR comprising a FR1, a FR2, a FR3, and a FR4 that have the sequence of a FR1, a FR2, a FR3, and a FR4 of a humanized B-H LC of Table 2; (ii) a VL comprising a FR comprising a FR1, a FR2, a FR3, and a FR4 that have the sequence of a FR1, a FR2, a FR3, and a FR4 of a humanized B-H LC of Table 2; or (iii) a combination thereof.

[0670] In some embodiments, the first TCRβV-binding moiety, the second TCRβV-binding moiety, or a combination thereof comprises: (i) a VH comprising a FR comprising a FR1, a FR2, a FR3, and a FR4 that have at least 75%, 80%, 85%, 90%, 95%, 99%, 99.5%, 99.9%, or 100% sequence identity with a FR1, a FR2, a FR3, and a FR4 of a humanized B-H LC of Table 2, respectively. (ii) a VL comprising a FR comprising a FR1, a FR2, a FR3, and a FR4 that have at least 75%, 80%, 85%, 90%, 95%, 99%, 99.5%, 99.9%, or 100% sequence identity with a FR1, a FR2, a FR3, and a FR4 of a humanized B-H LC of Table 2, respectively; or (iii) a combination thereof. In some embodiments, the first TCRβV-binding moiety, the second TCRβV-binding moiety, or a combination thereof comprises: (i) a VH comprising a FR comprising a FR1, a FR2, a FR3, and a FR4 that have the sequence of a FR1, a FR2, a FR3, and a FR4 of a humanized B-H LC of Table 2, respectively; (ii) a VL comprising a FR comprising a FR1, a FR2, a FR3, and a FR4 that have the sequence of a FR1, a FR2, a FR3, and a FR4 of a humanized B-H LC of Table 2, respectively; or (iii) a combination thereof.

[0671] In some embodiments, the first TCRβV-binding moiety, the second TCRβV-binding moiety, or a combination thereof comprises: (i) a VH comprising a sequence having at least 75%, 80%, 85%, 90%, 95%, 99%, 99.5%, 99.9%, or 100% sequence identity to the VH sequence of a humanized Antibody B-H listed in Table 2; (ii) a VL comprising a sequence having at least at least 75%, 80%, 85%, 90%, 95%, 99%, 99.5%, 99.9%, or 100% sequence identity to the VL sequence of a humanized Antibody B-H listed in Table 2; or (iii) a combination thereof. In some embodiments, the first TCRβV-binding moiety, the second TCRβV-binding moiety, or a combination thereof comprises: (i) a VH comprising the VH sequence of a humanized Antibody B-H listed in Table 2; (ii) a VL comprising the VL sequence of a humanized Antibody B-H listed in Table 2; or (iii) a combination thereof. In some embodiments, the first TCRβV-binding moiety, the second TCRβV-binding moiety, or a combination thereof comprises: (i) the VH of a humanized Antibody B-H listed in Table 2; (ii) the VL sequence of a humanized Antibody B-H listed in Table 2; or (iii) a combination thereof.

[0672] In some embodiments, the first polypeptide chain, the second polypeptide chain, the third polypeptide chain, the fourth poly peptide chain, or a combination thereof comprises a heavy chain constant region having a sequence having at least 75%, 80%, 85%, 90%, 95%, 99%, 99.5%, 99.9%, or 100% sequence identity to any one of the sequences listed in Table 3, 21, or 22 or a combination thereof. In some embodiments, the first polypeptide chain, the second polypeptide chain, the third polypeptide chain, the fourth polypeptide chain, or a combination thereof comprises a heavy chain constant region having any one of the sequences listed in Table 3, 21, or 22 or a combination thereof. In some embodiments, the first polypeptide chain, the second polypeptide chain, the third polypeptide chain, the fourth polypeptide chain, or a combination thereof comprises a heavy chain constant region of which sequence is a sequence having at least 75%, 80%, 85%, 90%, 95%, 99%, 99.5%, 99.9%, or 100% sequence identity to any one of the sequences listed in Table 3, 21, or 22 or a combination thereof. In some embodiments, the first poly peptide chain, the second polypeptide chain, the third polypeptide chain, the fourth polypeptide chain, or a combination thereof comprises a heavy chain constant region having any one of the heavy chain constant region sequences listed in Table 3, 21, or 22 or a combination thereof. In some embodiments, the first polypeptide chain, the second polypeptide chain, the third polypeptide chain, the fourth polypeptide chain, or a combination thereof comprises a heavy chain constant region of an IgM or a fragment thereof. In some embodiments, the heavy chain constant region of the IgM comprises a sequence having at least 75%, 80%, 85%, 90%, 95%, 99%, 99.5%, 99.9%, or 100% sequence identity to the sequence of SEQ ID NO: 73. In some embodiments, the heavy chain constant region of the IgM comprises the sequence of SEQ ID NO: 73. In some embodiments, the sequence of the heavy chain constant region of the IgM is the sequence of SEQ ID NO: 73.

[0673] In some embodiments, the first polypeptide chain, the second polypeptide chain, the third polypeptide chain, the fourth polypeptide chain, or a combination thereof comprises a heavy chain constant region of an IgJ or a fragment thereof. In some embodiments, the heavy chain constant region of the IgJ comprises a sequence having at least 75%, 80%, 85%, 90%, 95%, 99%, 99.5%, 99.9%, or 100% sequence identity to the sequence of SEQ ID NO: 76. In some embodiments, the heavy chain constant region of the IgJ comprises the sequence of SEQ ID NO: 76. In some embodiments, the sequence of the heavy chain constant region of the IgJ is the sequence of SEQ ID NO: 76.

[0674] In some embodiments, the first polypeptide chain, the second polypeptide chain, the third polypeptide chain, the fourth polypeptide chain, or a combination thereof comprises a heavy chain constant region of an IgGA1 or a fragment thereof. In some embodiments, the heavy chain constant region of the IgGA1 comprises a sequence having at least 75%, 80%, 85%, 90%, 95%, 99%, 99.5%, 99.9%, or 100% sequence identity to the sequence of SEQ ID NO: 74. In some embodiments, the heavy chain constant region of the IgGA1 comprises the sequence of SEQ ID NO: 74. In some embodiments, the sequence of the heavy chain constant region of the IgGA1 is the sequence of SEQ ID NO: 74.

[0675] In some embodiments, the first polypeptide chain, the second polypeptide chain, the third polypeptide chain, the fourth poly peptide chain, or a combination thereof comprises a heavy chain constant region of an IgGA2 or a fragment thereof. In some embodiments, the heavy chain constant region of the IgGA2 comprises a sequence having at least 75%, 80%, 85%, 90%, 95%, 99%, 99.5%, 99.9%, or 100% sequence identity to the sequence of SEQ ID NO: 75. In some embodiments, the heavy chain constant region of the IgGA2 comprises the sequence of SEQ ID NO: 75. In some embodiments, the sequence of the heavy chain constant region of the IgGA2 is the sequence of SEQ ID NO: 75.

[0676] In some embodiments, the first polypeptide chain, the second polypeptide chain, the third polypeptide chain, the fourth polypeptide chain, or a combination thereof comprises a heavy chain constant region of an IgG1 or a fragment thereof. In some embodiments, the heavy chain constant region of the IgG1 comprises a sequence having at least 75%, 80%, 85%, 90%, 95%, 99%, 99.5%, 99.9%, or 100% sequence identity to the sequence of SEQ ID NO: 41. In some embodiments, the heavy chain constant region of the IgG1 comprises the sequence of SEQ ID NO: 41. In some embodiments, the sequence of the heavy chain constant region of the IgG1 is the sequence of SEQ ID NO: 41. In some embodiments, the heavy chain constant region of the IgG1 comprises a sequence having at least 75%, 80%, 85%, 90%, 95%, 99%, 99.5%, 99.9%, or 100% sequence identity to the sequence of SEQ ID NO: 3645. In some embodiments, the heavy chain constant region of the IgG1 comprises the sequence of SEQ ID NO: 3645. In some embodiments, the sequence of the heavy chain constant region of the IgG1 is the sequence of SEQ ID NO: 3645.

[0677] In some embodiments, the first polypeptide chain, the second polypeptide chain, the third polypeptide chain, the fourth polypeptide chain, or a combination thereof comprises a light chain constant region having a sequence having at least 75%, 80%, 85%, 90%, 95%, 99%, 99.5%, 99.9%, or 100% sequence identity to any one of the sequences listed in Table 3, 21, or 22 or a combination thereof. In some embodiments, the first polypeptide chain, the second polypeptide chain, the third polypeptide chain, the fourth polypeptide chain, or a combination thereof comprises a light chain constant region having any one of the sequences listed in Table 3, 21, or 22 or a combination thereof. In some embodiments, the first polypeptide chain, the second polypeptide chain, the third polypeptide chain, the fourth polypeptide chain, or a combination thereof comprises a light chain constant region having any one of the light chain constant region sequences listed in Table 3, 21, or 22 or a combination thereof.

[0678] In some embodiments, the first polypeptide chain, the second polypeptide chain, the third polypeptide chain, the fourth polypeptide chain, or a combination thereof comprises a light chain constant region of a kappa chain or a fragment thereof. In some embodiments, the light chain constant region of a kappa chain comprises a light chain constant region sequence listed in Table 3, 21, or 22.

[0679] In some embodiments, the light chain constant region of a kappa chain comprises a sequence having at least 75%, 80%, 85%, 90%, 95%, 99%, 99.5%, 99.9%, or 100% sequence identity to the sequence of SEQ ID NO: 39 or SEQ ID NO: 3644. In some embodiments, the light chain constant region of a kappa chain comprises the sequence of SEQ ID NO: 39 or SEQ ID NO: 3644. In some embodiments, the sequence of the light chain constant region of a kappa chain is a sequence having at least 75%, 80%, 85%, 90%, 95%, 99%, 99.5%, 99.9%, or 100% sequence identity to the sequence of SEQ ID NO: 39 or SEQ ID NO: 3644. In some embodiments, the sequence of the light chain constant region of a kappa chain is the sequence of SEQ ID NO: 39 or SEQ ID NO: 3644.

[0680] In some embodiments, the first TCRβV-binding moiety, the second TCRβV-binding moiety, or a combination thereof comprises: (i) a HC CDR1, a HC CDR2 and a HC CDR3 comprising amino acid sequences having at least 75%, 80%, 85%, 90%, 95%, 99%, 99.5%, 99.9%, or 100% sequence identity to CDR1, CDR2, and CDR3 sequences of a VH disclosed in Tables 1, 2, 10, 11, 12 or 13; (ii) a LC CDR1, a LC CDR2, and a LC CDR3 comprising an amino acid sequence having at least 75%, 80%, 85%, 90%, 95%, 99%. 99.5%, 99.9%, or 100% sequence identity to CDR1, CDR2, and CDR3 sequences of a VL disclosed in Tables 1, 2, 10, 11, 12 or 13; or (iii) a combination thereof. In some embodiments, the first TCRβV-binding moiety, the second TCRβV-binding moiety, or a combination thereof comprises: (i) a HC CDR1, a HC CDR2 and a HC CDR3 comprising the CDR1, CDR2, and CDR3 sequences of a VH disclosed in Tables 1, 2, 10, 11, 12 or 13; (ii) a LC CDR1, a LC CDR2, and a LC CDR3 comprising the CDR1, CDR2, and CDR3 sequences of a VL disclosed in Tables 1, 2, 10, 11, 12 or 13; or (iii) a combination thereof. In some embodiments, the first TCRβV-binding moiety, the second TCRβV-binding moiety, or a combination thereof comprises: (i) a HC CDR1, a HC CDR2 and a HC CDR3 comprising amino acid sequences having at least 75%, 80%, 85%, 90%, 95%, 99%, 99.5%, 99.9%, or 100% sequence identity to CDR1, CDR2, and CDR3 sequences of a VH disclosed in Tables 1, 2, 10, 11, 12 or 13, respectively; (ii) a LC CDR1, a LC CDR2, and a LC CDR3 comprising an amino acid sequence having at least 75%, 80%, 85%, 90%, 95%, 99%, 99.5%, 99.9%, or 100% sequence identity to CDR1, CDR2, and CDR3 sequences of a VL disclosed in Tables 1, 2, 10, 11, 12 or 13, respectively; or (iii) a combination thereof. In some embodiments, the first TCRβV-binding moiety, the second TCRβV-binding moiety, or a combination thereof comprises: (i) a HC CDR1, a HC CDR2 and a HC CDR3 comprising the CDR1, CDR2, and CDR3 sequences of a VH disclosed in Tables 1, 2, 10, 11, 12 or 13, respectively; (ii) a LC CDR1, a LC CDR2, and a LC CDR3 comprising the CDR1, CDR2, and CDR3 sequences of a VL disclosed in Tables 1, 2, 10, 11, 12 or 13, respectively; or (iii) a combination thereof. In some embodiments, the first TCRβV-binding moiety, the second TCRβV-binding moiety, or a combination thereof comprises: (i) a HC CDR1, a HC CDR2 and a HC CDR3 of a VH disclosed in Tables 1, 2, 10, 11, 12 or 13; (ii) a LC CDR1, a LC CDR2, and a LC CDR3 of a VL disclosed in Tables 1, 2, 10, 11, 12 or 13; or (iii) a combination thereof.

[0681] In some embodiments, the first TCRβV-binding moiety, the second TCRβV-binding moiety, or a combination thereof comprises a light chain comprising a FR1 comprising: (i) an Aspartic Acid at position 1 according to Kabat numbering; (ii) an Asparagine at position 2 according to Kabat numbering; (iii) a Leucine at position 4 according to Kabat numbering; or (iv) a combination thereof.

[0682] In some embodiments, the first TCRβV-binding moiety, the second TCRβV-binding moiety, or a combination thereof comprises a light chain comprising a FR3 comprising: (i) a Glycine at position 66 according to Kabat numbering; (ii) an Asparagine at position 69 according to Kabat numbering; (iii) a Tyrosine at position 71 according to Kabat numbering; or (iv) a combination thereof.

[0683] In some embodiments, the first TCRβV-binding moiety, the second TCRβV-binding moiety, or a combination thereof binds to an outward facing region on a TCRβV protein. In some embodiments, the outward facing region on the TCRβV protein comprises a structurally conserved region of TCRβV having a similar structure across one or more TCRβV subfamilies.

### Cytokine Molecules

[0684] In some embodiments, the multifunctional molecule includes a cytokine molecule. As used herein, a “cytokine molecule” or a “cytokine polypeptide” as interchangeably used herein, refers to full length, a fragment or a variant of a cytokine, a cytokine further comprising a receptor domain, e.g., a cytokine receptor dimerizing domain; or an agonist of a cytokine receptor, e.g., an antibody molecule (e.g., an agonistic antibody) to a cytokine receptor, that elicits at least one activity of a naturally-occurring cytokine. In some embodiments the cytokine molecule is chosen from interleukin-2 (IL-2), interleukin-7 (IL-7), interleukin-12 (IL-12), interleukin-10 (IL-10), interleukin-15 (IL-15), interleukin-18 (IL-18), interleukin-21 (IL-21), or interferon gamma, or a fragment or variant thereof, or a combination of any of the aforesaid cytokines. The cytokine molecule can be a monomer or a dimer. In embodiments, the cytokine molecule can further include a cytokine receptor dimerizing domain. In other embodiments, the cytokine molecule is an agonist of a cytokine receptor, e.g., an antibody molecule (e.g., an agonistic antibody) to a cytokine receptor chosen from an IL-15Ra or IL-21R.

[0685] Cytokines are generally polypeptides that influence cellular activity, for example, through signal transduction pathways. Accordingly, a cytokine of the multispecific or multifunctional polypeptide is useful and can be associated with receptor-mediated signaling that transmits a signal from outside the cell membrane to modulate a response within the cell. Cytokines are proteinaceous signaling compounds that are mediators of the immune response. They control many different cellular functions including proliferation, differentiation and cell survival/apoptosis: cytokines are also involved in several pathophysiological processes including viral infections and autoimmune diseases. Cytokines are synthesized under various stimuli by a variety of cells of both the innate (monocytes, macrophages, dendritic cells) and adaptive (T- and B-cells) immune systems. Cytokines can be classified into two groups: pro- and anti-inflammatory. Pro-inflammatory cytokines, including IFNγ, IL-1, IL-6 and TNF-alpha, are predominantly derived from the innate immune cells and Th1 cells. Anti-inflammatory cytokines, including IL-10, IL-4, IL-13 and IL-5, are synthesized from Th2 immune cells.

[0686] Provided herein are, inter alia, multispecific (e.g., bi-, tri-, quad-specific) or multifunctional molecules, that include, e.g., are engineered to contain, one or more cytokine molecules, e.g., immunomodulatory (e.g., proinflammatory) cytokines and variants, e.g., functional variants, thereof. Accordingly, in some embodiments, the cytokine molecule is an interleukin or a variant, e.g., a functional variant thereof. In some embodiments the interleukin is a proinflammatory interleukin. In some embodiments the interleukin is chosen from interleukin-2 (IL-2), interleukin-12 (IL-12), interleukin-15 (IL-15), interleukin-18 (IL-18), interleukin-21 (IL-21), interleukin-7 (IL-7), or interferon gamma. In some embodiments, the cytokine molecule is a proinflammatory cytokine.

[0687] In certain embodiments, the cytokine is a single chain cytokine. In certain embodiments, the cytokine is a multichain cytokine (e.g., the cytokine comprises 2 or more (e.g., 2) polypeptide chains. An exemplary multichain cytokine is IL-12.

[0688] Examples of useful cytokines include, but are not limited to, GM-CSF, IL-1α, IL-1β, IL-2, IL-3, IL-4, IL-5, IL-6, IL-7, IL-8, IL-10, IL-12, IL-21, IFN-α, IFN-β, IFN-γ, MIP-1α, MIP-1β, TGF-β, TNF-α, and TNFβ. In some embodiments the cytokine of the multispecific or multifunctional polypeptide is a cytokine selected from the group of GM-CSF, IL-2, IL-7, IL-8, IL-10, IL-12, IL-15, IL-21, IFN-α, IFN-γ, MIP-1α, MIP-1β and TGF-β. In some embodiments the cytokine of the i the multispecific or multifunctional polypeptide is a cytokine selected from the group of IL-2, IL-7, IL-10, IL-12, IL-15, IFN-α, and IFN-γ. In certain embodiments the cytokine is mutated to remove N- and/or O-glycosylation sites. Elimination of glycosylation increases homogeneity of the product obtainable in recombinant production.

[0689] In some embodiments, the cytokine of the multispecific or multifunctional polypeptide is IL-2. In a specific embodiment, the IL-2 cytokine can elicit one or more of the cellular responses selected from the group consisting of: proliferation in an activated T lymphocyte cell, differentiation in an activated T lymphocyte cell, cytotoxic T cell (CTL) activity, proliferation in an activated B cell, differentiation in an activated B cell, proliferation in a natural killer (NK) cell, differentiation in a NK cell, cytokine secretion by an activated T cell or an NK cell, and NK/lymphocyte activated killer (LAK) antitumor cytotoxicity. In another particular embodiment the IL-2 cytokine is a mutant IL-2 cytokine having reduced binding affinity to the .alpha.-subunit of the IL-2 receptor. Together with the .beta.- and .gamma.-subunits (also known as CD 122 and CD132, respectively), the .alpha.-subunit (also known as CD25) forms the heterotrimeric high-affinity IL-2 receptor, while the dimeric receptor consisting only of the β- and γ-subunits is termed the intermediate-affinity IL-2 receptor. As described in PCT patent application number PCT/EP2012/051991, which is incorporated herein by reference in its entirety, a mutant IL-2 polypeptide with reduced binding to the .alpha.-subunit of the IL-2 receptor has a reduced ability to induce IL-2 signaling in regulatory T cells, induces less activation-induced cell death (AICD) in T cells, and has a reduced toxicity profile in vivo, compared to a wild-type IL-2 polypeptide. The use of such an cytokine with reduced toxicity is particularly advantageous in a multispecific or multifunctional polypeptide according to the invention, having a long serum half-life due to the presence of an Fc domain. In some embodiments, the mutant IL-2 cytokine of the multispecific or multifunctional polypeptide according to the invention comprises at least one amino acid mutation that reduces or abolishes the affinity of the mutant IL-2 cytokine to the .alpha.-subunit of the IL-2 receptor (CD25) but preserves the affinity of the mutant IL-2 cytokine to the intermediate-affinity IL-2 receptor (consisting of the β and γ subunits of the IL-2 receptor), compared to the non-mutated IL-2 cytokine. In some embodiments the one or more amino acid mutations are amino acid substitutions. In a specific embodiment, the mutant IL-2 cytokine comprises one, two or three amino acid substitutions at one, two or three position(s) selected from the positions corresponding to residue 42, 45, and 72 of human IL-2. In a more specific embodiment, the mutant IL-2 cytokine comprises three amino acid substitutions at the positions corresponding to residue 42, 45 and 72 of human IL-2. In an even more specific embodiment, the mutant IL-2 cytokine is human IL-2 comprising the amino acid substitutions F42A, Y45A and L72G. In some embodiments the mutant IL-2 cytokine additionally comprises an amino acid mutation at a position corresponding to position 3 of human IL-2, which eliminates the O-glycosylation site of IL-2. Particularly, said additional amino acid mutation is an amino acid substitution replacing a threonine residue by an alanine residue. A particular mutant IL-2 cytokine useful in the invention comprises four amino acid substitutions at positions corresponding to residues 3, 42, 45 and 72 of human IL-2. Specific amino acid substitutions are T3A, F42A, Y45A and L72G. As demonstrated in PCT patent application number PCT/EP2012/051991 and in the appended Examples, said quadruple mutant IL-2 polypeptide (IL-2 qm) exhibits no detectable binding to CD25, reduced ability to induce apoptosis in T cells, reduced ability to induce IL-2 signaling in T.sub.reg cells, and a reduced toxicity profile in vivo. However, it retains ability to activate IL-2 signaling in effector cells, to induce proliferation of effector cells, and to generate IFN-γ as a secondary cytokine by NK cells.

[0690] The IL-2 or mutant IL-2 cytokine according to any of the above embodiments may comprise additional mutations that provide further advantages such as increased expression or stability. For example, the cysteine at position 125 may be replaced with a neutral amino acid such as alanine, to avoid the formation of disulfide-bridged IL-2 dimers. Thus, in certain embodiments the IL-2 or mutant IL-2 cytokine of the multispecific or multifunctional polypeptide according to the invention comprises an additional amino acid mutation at a position corresponding to residue 125 of human IL-2. In some embodiments said additional amino acid mutation is the amino acid substitution C125A.

[0691] In a specific embodiment the IL-2 cytokine of the multispecific or multifunctional polypeptide comprises the polypeptide sequence of SEQ ID NO: 2270

[APTSSSTKKTQLQLEHLLLDLQMILNGINNYKNPKLTRMLTFKFYMPK
KATELKHLQCLEEELKPLEEVLNLAQSKNFHLRPRDLISNINVIVLELK
GSETTFMCEYADETATIVEFLNRWITFAQSIISTLT].

[0692] In another specific embodiment the IL-2 cytokine of the multispecific or multifunctional polypeptide comprises the polypeptide sequence of SEQ ID NO: 2280

[APASSSTKKTQLQLEHLLLDLQMILNGINNYKNPKLTRMLTAKFAMPK
KATELKHLQCLEEELKPLEEVLNGAQSKNFHLRPRDLISNINVIVLELK
GSETTFMCEYADETATIVEFLNRWITFAQSIISTLT].

[0693] In another embodiment the cytokine of the multispecific or multifunctional polypeptide is IL-12. In a specific embodiment said IL-12 cytokine is a single chain IL-12 cytokine. In an even more specific embodiment the single chain IL-12 cytokine comprises the polypeptide sequence of SEQ ID NO: 2290 [IWELKKDVYVVELDWYPDAPGEMVVLTCDTPEEDGITWTLDQSSEVLGSGKTLTIQVKEFGDAGQ YTCHKGGEVLSHSLLLLHKKEDGIWSTDILKDQKEPKNKTFLRCEAKNYSGRFTCWWLTTISTDLTF SVKSSRGSSDPQGVTCGAATLSAERVRGDNKEYEYSVECQEDSACPAAEESLPIEVMVDAVHKLKY ENYTSSFFIRDIIKPDPPKNLQLKPLKNSRQVEVSWEYPDTWSTPHSYFSLTFCVQVQGKSKREKKDR VFTDKTSATVICRKNASISVRAQDRYYSSSWSEWASVPCSGGGGSGGGGSGGGGSRNLPVATPDPG MFPCLHHSQNLLRAVSNMLQKARQTLEFYPCTSEEIDHEDITKDKTSTVEACLPLELTKNESCLNSRE TSFITNGSCLASRKTSFMMALCLSSIYEDLKMYQVEFKTMNAKLLMDPKRQIFLDQNMLAVIDELMQ ALNFNSETVPQKSSLEEPDFYKTKIKLCILLHAFRIRAVTIDRVMSYLNAS]. In some embodiments, the IL-12 cytokine can elicit one or more of the cellular responses selected from the group consisting of: proliferation in a NK cell, differentiation in a NK cell, proliferation in a T cell, and differentiation in a T cell.

[0694] In another embodiment the cytokine of the multispecific or multifunctional polypeptide is IL-10. In a specific embodiment said IL-10 cytokine is a single chain IL-10 cytokine. In an even more specific embodiment the single chain IL-10 cytokine comprises the polypeptide sequence of SEQ ID NO: 2300

[SPGQGTQSENSCTHFPGNLPNMLRDLRDAFSRVKTFFQMKDQLDNLLL
KESLLEDFKGYLGCQALSEMIQFYLEEVMPQAENQDPDIKAHVNSLGEN
LKTLRLRLRRCHRFLPCENKSKAVEQVKNAFNKLQEKGIYKAMSEFDIF
INYIEAYMTMKIRNGGGGSGGGGSGGGGSGGGGSSPGQGTQSENSCTHF
PGNLPNMLRDLRDAFSRVKTFFQMKDQLDNLLLKESLLEDFKGYLGCQA
LSEMIQFYLEEVMPQAENQDPDIKAHVNSLGENLKTLRLRLRRCHRFLP
CENKSKAVEQVKNAFNKLQEKGIYKAMSEFDIFINYIEAYMTMKIRN].

[0695] In another specific embodiment the IL-10 cytokine is a monomeric IL-10 cytokine. In a more specific embodiment the monomeric IL-10 cytokine comprises the polypeptide sequence of SEQ ID NO: 2310 [SPGQGTQSENSCTHFPGNLPNMLRDLRDAFSRVKTFFQMKDQLDNLLLKESLLEDFKGYLGCQALS EMIQFYLEEVMPQAENQDPDIKAHVNSLGENLKTLRLRLRRCHRFLPCENGGGSGGKSKAVEQVKN AFNKLQEKGIYKAMSEFDIFINYIEAYMTMKIRN]. In some embodiments, the IL-10 cytokine can elicit one or more of the cellular responses selected from the group consisting of: inhibition of cytokine secretion, inhibition of antigen presentation by antigen presenting cells, reduction of oxygen radical release, and inhibition of T cell proliferation. A multispecific or multifunctional polypeptide according to the invention wherein the cytokine is IL-10 is particularly useful for downregulation of inflammation, e.g. in the treatment of an inflammatory disorder.

[0696] In another embodiment, the cytokine of the multispecific or multifunctional polypeptide is IL-15. In a specific embodiment said IL-15 cytokine is a mutant IL-15 cytokine having reduced binding affinity to the α-subunit of the IL-15 receptor. Without wishing to be bound by theory, a mutant IL-15 polypeptide with reduced binding to the .alpha.-subunit of the IL-15 receptor has a reduced ability to bind to fibroblasts throughout the body, resulting in improved pharmacokinetics and toxicity profile, compared to a wild-type IL-15 polypeptide. The use of an cytokine with reduced toxicity, such as the described mutant IL-2 and mutant IL-15 effector moieties, is particularly advantageous in a multispecific or multifunctional poly peptide according to the invention, having a long serum half-life due to the presence of an Fc domain. In some embodiments the mutant IL-15 cytokine of the multispecific or multifunctional polypeptide according to the invention comprises at least one amino acid mutation that reduces or abolishes the affinity of the mutant IL-15 cytokine to the .alpha.-subunit of the IL-15 receptor but preserves the affinity of the mutant IL-15 cytokine to the intermediate-affinity IL-15/IL-2 receptor (consisting of the .beta.- and gamma.-subunits of the IL-15/IL-2 receptor), compared to the non-mutated IL-15 cytokine. In some embodiments the amino acid mutation is an amino acid substitution. In a specific embodiment, the mutant IL-15 cytokine comprises an amino acid substitution at the position corresponding to residue 53 of human IL-15. In a more specific embodiment, the mutant IL-15 cytokine is human IL-15 comprising the amino acid substitution E53A. In some embodiments the mutant IL-15 cytokine additionally comprises an amino acid mutation at a position corresponding to position 79 of human IL-15, which eliminates the N-glycosylation site of IL-15. Particularly, said additional amino acid mutation is an amino acid substitution replacing an asparagine residue by an alanine residue. In an even more specific embodiment the IL-15 cytokine comprises the polypeptide sequence of SEQ ID NO: 2320 [NWVNVISDLKKIEDLIQSMHIDATLYTESDVHPSCKVTAMKCFLLELQVISLASGDASIHDTVENLIIL ANNSLSSNGAVTESGCKECEELEEKNIKEFLQSFVHIVQMFINTS]. In some embodiments, the IL-15 cytokine can elicit one or more of the cellular responses selected from the group consisting of: proliferation in an activated T lymphocyte cell, differentiation in an activated T lymphocyte cell, cytotoxic T cell (CTL) activity, proliferation in an activated B cell, differentiation in an activated B cell, proliferation in a natural killer (NK) cell, differentiation in a NK cell, cytokine secretion by an activated T cell or an NK cell, and NK/lymphocyte activated killer (LAK) antitumor cytotoxicity.

[0697] Mutant cytokine molecules useful as effector moieties in the multispecific or multifunctional polypeptide can be prepared by deletion, substitution, insertion or modification using genetic or chemical methods well known in the art. Genetic methods may include site-specific mutagenesis of the encoding DNA sequence. PCR, gene synthesis, and the like. The correct nucleotide changes can be verified for example by sequencing. Substitution or insertion may involve natural as well as non-natural amino acid residues. Amino acid modification includes well known methods of chemical modification such as the addition or removal of glycosylation sites or carbohydrate attachments, and the like.

[0698] In some embodiments, the cytokine, particularly a single-chain cytokine, of the multispecific or multifunctional polypeptide is GM-CSF. In a specific embodiment, the GM-CSF cytokine can elicit proliferation and/or differentiation in a granulocyte, a monocyte or a dendritic cell. In some embodiments, the cytokine, particularly a single-chain cytokine, of the multispecific or multifunctional polypeptide is IFN-α. In a specific embodiment, the IFN-α cytokine can elicit one or more of the cellular responses selected from the group consisting of: inhibiting viral replication in a virus-infected cell, and upregulating the expression of major histocompatibility complex I (MHC I). In another specific embodiment, the IFN-α cytokine can inhibit proliferation in a tumor cell. In some embodiments the cytokine, particularly a single-chain cytokine, of the multispecific or multifunctional polypeptide is IFNγ. In a specific embodiment, the IFN-γ cytokine can elicit one or more of the cellular responses selected from the group of, increased macrophage activity, increased expression of MHC molecules, and increased NK cell activity. In some embodiments the cytokine, particularly a single-chain cytokine, of the multispecific or multifunctional polypeptide is IL-7. In a specific embodiment, the IL-7 cytokine can elicit proliferation of T and/or B lymphocytes. In some embodiments, the cytokine, particularly a single-chain cytokine, of the multispecific or multifunctional polypeptide is IL-8. In a specific embodiment, the IL-8 cytokine can elicit chemotaxis in neutrophils. In some embodiments, the cytokine, particularly a single-chain cytokine, of the multispecific or multifunctional polypeptide, is MIP-1a. In a specific embodiment, the MIP-1α cytokine can elicit chemotaxis in monocytes and T lymphocyte cells. In some embodiments, the cytokine, particularly a single-chain cytokine, of the multispecific or multifunctional polypeptide is MIP-1β. In a specific embodiment, the MIP-1β cytokine can elicit chemotaxis in monocytes and T lymphocyte cells. In some embodiments, the cytokine, particularly a single-chain cytokine, of the multispecific or multifunctional polypeptide is TGF-β. In a specific embodiment, the TGF-β cytokine can elicit one or more of the cellular responses selected from the group consisting of, chemotaxis in monocytes, chemotaxis in macrophages, upregulation of IL-1 expression in activated macrophages, and upregulation of IgA expression in activated B cells.

[0699] In some embodiments, the multispecific or multifunctional polypeptide of the invention binds to an cytokine receptor with a dissociation constant (K_{D}) that is at least about 1, 1.5, 2, 2.5, 3, 3.5, 4, 4.5, 5, 5.5, 6, 6.5, 7, 7.5, 8, 8.5, 9, 9.5 or 10 times greater than that for a control cytokine. In another embodiment, the multispecific or multifunctional polypeptide binds to an cytokine receptor with a K_{D} that is at least 2, 3, 4, 5, 6, 7, 8, 9, or 10 times greater than that for a corresponding multispecific or multifunctional polypeptide comprising two or more effector moieties. In another embodiment, the multispecific or multifunctional polypeptide binds to an cytokine receptor with a dissociation constant K_{D} that is about 10 times greater than that for a corresponding the multispecific or multifunctional polypeptide comprising two or more cytokines.

[0700] In some embodiments, the multispecific molecules as described herein include a cytokine molecule. In embodiments, the cytokine molecule includes a full length, a fragment or a variant of a cytokine: a cytokine receptor domain, e.g., a cytokine receptor dimerizing domain; or an agonist of a cytokine receptor, e.g., an antibody molecule (e.g., an agonistic antibody) to a cytokine receptor.

[0701] In some embodiments the cytokine molecule is chosen from IL-2, IL-12, IL-15, IL-18, IL-7, IL-21, or interferon gamma, or a fragment or variant thereof, or a combination of any of the aforesaid cytokines. The cytokine molecule can be a monomer or a dimer. In embodiments, the cytokine molecule can further include a cytokine receptor dimerizing domain.

[0702] In other embodiments, the cytokine molecule is an agonist of a cytokine receptor, e.g., an antibody molecule (e.g., an agonistic antibody) to a cytokine receptor chosen from an IL-15Ra or IL-21R.

[0703] In some embodiments, the cytokine molecule is IL-15, e.g., human IL-15 (e.g., comprising the amino acid sequence: NWVNVISDLKKIEDLIQSMHIDATLYTESDVHPSCKVTAMKCFLLELQVISLESGDASIHDTVENLIIL ANNSLSSNGNVTESGCKECEELEEKNIKEFLQSFVHIVQMFINTS (SEQ ID NO: 2170), a fragment thereof, or an amino acid sequence substantially identical thereto (e.g., 95% to 99.9% identical thereto, or having at least one amino acid alteration, but not more than five, ten or fifteen alterations (e.g., substitutions, deletions, or insertions, e.g., conservative substitutions) to the amino acid sequence of SEQ ID NO: 2170.

[0704] In some embodiments, the cytokine molecule comprises a receptor dimerizing domain, e.g., an IL15Ralpha dimerizing domain. In some embodiments, the IL15Ralpha dimerizing domain comprises the amino acid sequence: MAPRRARGCRTLGLPALLLLLLLRPPATRGITCPPPMSVEHADIWVKSYSLYSRERYICNSGFKRKAG TSSLTECVL (SEQ ID NO: 2180), a fragment thereof, or an amino acid sequence substantially identical thereto (e.g., 95% to 99.9% identical thereto, or having at least one amino acid alteration, but not more than five, ten or fifteen alterations (e.g., substitutions, deletions, or insertions, e.g., conservative substitutions) to the amino acid sequence of SEQ ID NO: 2180. In some embodiments, the cytokine molecule (e.g. IL-15) and the receptor dimerizing domain (e.g., an IL. 15Ralpha dimerizing domain) of the multispecific molecule are covalently linked, e.g., via a linker (e.g., a Gly-Ser linker, e.g., a linker comprising the amino acid sequence SGGSGGGGSGGGSGGGGSLQ (SEQ ID NO: 2190). In other embodiments, the cytokine molecule (e.g., IL-15) and the receptor dimerizing domain (e.g., an IL15Ralpha dimerizing domain) of the multispecific molecule are not covalently linked, e.g., are non-covalently associated.

[0705] In other embodiments, the cytokine molecule is IL-2, e.g., human IL-2 (e.g., comprising the amino acid sequence: APTSSSTKKTQLQLEHLLLDLQMILNGINNYKNPKLTRMLTFKFYMPKKATELKHLQCLEEELKPLE EVLNLAQSKNFHLRPRDLISNINVIVLELKGSETTFMCEYADETATIVEFLNRWITFCQSIISTLT (SEQ ID NO: 2191), a fragment thereof, or an amino acid sequence substantially identical thereto (e.g., 95% to 99.9% identical thereto, or having at least one amino acid alteration, but not more than five, ten or fifteen alterations (e.g., substitutions, deletions, or insertions, e.g., conservative substitutions) to the amino acid sequence of SEQ ID NO:2191).

[0706] In other embodiments, the cytokine molecule is IL-18, e.g., human IL-18 (e.g., comprising the amino acid sequence: YFGKLESKLSVIRNLNDQVLFIDQGNRPLFEDMTDSDCRDNAPRTIFIISMYKDSQPRGMAVTISVKC EKISTLSCENKIISFKEMNPPDNIKDTKSDIIFFQRSVPGHDNKMQFESSSYEGYFLACEKERDLFKLIL KKEDELGDRSIMFTVQNED (SEQ ID NO: 2192), a fragment thereof, or an amino acid sequence substantially identical thereto (e.g., 95% to 99.9% identical thereto, or having at least one amino acid alteration, but not more than five, ten or fifteen alterations (e.g., substitutions, deletions, or insertions, e.g., conservative substitutions) to the amino acid sequence of SEQ ID NO: 2192).

[0707] In other embodiments, the cytokine molecule is IL-21, e.g., human IL-21 (e.g., comprising the amino acid sequence: QGQDRHMIRMRQLIDIVDQLKNYVNDLVPEFLPAPEDVETNCEWSAFSCFQKAQLKSANTGNNERII NVSIKKLKRKPPSTNAGRRQKHRLTCPSCDSYEKKPPKEFLERFKSLLQKMIHQHLSSRTHGSEDS (SEQ ID NO: 2193), a fragment thereof, or an amino acid sequence substantially identical thereto (e.g., 95% to 99.9% identical thereto, or having at least one amino acid alteration, but not more than five, ten or fifteen alterations (e.g., substitutions, deletions, or insertions, e.g., conservative substitutions) to the amino acid sequence of SEQ ID NO: 2193).

[0708] In yet other embodiments, the cytokine molecule is interferon gamma, e.g., human interferon gamma (e.g., comprising the amino acid sequence: QDPYVKEAENLKKYFNAGHSDVADNGTLFLGILKNWKEESDRKIMQSQIVSFYFKLFKNFKDDQSIQ KSVETIKEDMNVKFFNSNKKKRDDFEKLTNYSVTDLNVQRKAIHELIQVMAELSPAAKTGKRKRSQ MLFRG (SEQ ID NO: 2194), a fragment thereof, or an amino acid sequence substantially identical thereto (e.g., 95% to 99.9% identical thereto, or having at least one amino acid alteration, but not more than five, ten or fifteen alterations (e.g., substitutions, deletions, or insertions, e.g., conservative substitutions) to the amino acid sequence of SEQ ID NO: 2194).

### Immune Cell Engagers

[0709] In some embodiments, the multifunctional molecule further includes an immune cell engager. “An immune cell engager” refers to one or more binding specificities that bind and/or activate an immune cell, e.g., a cell involved in an immune response. In embodiments, the immune cell is chosen from a T cell, an NK cell, a B cell, a dendritic cell, and/or the macrophage cell. The immune cell engager can be an antibody molecule, a receptor molecule (e.g., a full length receptor, receptor fragment, or fusion thereof (e.g., a receptor-Fc fusion)), or a ligand molecule (e.g., a full length ligand, ligand fragment, or fusion thereof (e.g., a ligand-Fc fusion)) that binds to the immune cell antigen (e.g., the T cell, the NK cell antigen, the B cell antigen, the dendritic cell antigen, and/or the macrophage cell antigen). In embodiments, the immune cell engager specifically binds to the target immune cell, e.g., binds preferentially to the target immune cell. For example, when the immune cell engager is an antibody molecule, it binds to an immune cell antigen (e.g., a T cell antigen, an NK cell antigen, a B cell antigen, a dendritic cell antigen, and/or a macrophage cell antigen) with a dissociation constant of less than about 10 nM.

[0710] The immune cell engagers, e.g., first and/or second immune cell engager of the multispecific or multifunctional molecules as described herein can mediate binding to, and/or activation of, an immune cell, e.g., an immune effector cell. In some embodiments, the immune cell is chosen from a T cell, an NK cell, a B cell, a dendritic cell, or a macrophage cell engager, or a combination thereof. In some embodiments, the immune cell engager is chosen from one, two, three, or all of a T cell engager, NK cell engager, a B cell engager, a dendritic cell engager, or a macrophage cell engager, or a combination thereof. The immune cell engager can be an agonist of the immune system. In some embodiments, the immune cell engager can be an antibody molecule, a ligand molecule (e.g., a ligand that further comprises an immunoglobulin constant region, e.g., an Fc region), a small molecule, a nucleotide molecule.

### Natural Killer Cell Engagers:

[0711] Natural Killer (NK) cells recognize and destroy tumors and virus-infected cells in an antibody-independent manner. The regulation of NK cells is mediated by activating and inhibiting receptors on the NK cell surface. One family of activating receptors is the natural cytotoxicity receptors (NCRs) which include NKp30, NKp44 and NKp46. The NCRs initiate tumor targeting by recognition of heparan sulfate on cancer cells. NKG2D is a receptor that provides both stimulatory and costimulatory innate immune responses on activated killer (NK) cells, leading to cytotoxic activity. DNAM1 is a receptor involved in intercellular adhesion, lymphocyte signaling, cytotoxicity and lymphokine secretion mediated by cytotoxic T-lymphocyte (CTL) and NK cell. DAP10 (also known as HCST) is a transmembrane adapter protein which associates with KLRK1 to form an activation receptor KLRK1-HCST in lymphoid and myeloid cells: this receptor plays a major role in triggering cytotoxicity against target cells expressing cell surface ligands such as MHC class I chain-related MICA and MICB, and U (optionally L1) 6-binding proteins (ULBPs): it KLRK1-HCST receptor plays a role in immune surveillance against tumors and is required for cytolysis of tumors cells: indeed, melanoma cells that do not express KLRK1 ligands escape from immune surveillance mediated by NK cells. CD16 is a receptor for the Fc region of IgG, which binds complexed or aggregated IgG and also monomeric IgG and thereby mediates antibody-dependent cellular cytotoxicity (ADCC) and other antibody-dependent responses, such as phagocytosis.

[0712] In some embodiments, the NK cell engager is a viral hemagglutinin (HA), HA is a glycoprotein found on the surface of influenza viruses. It is responsible for binding the virus to cells with sialic acid on the membranes, such as cells in the upper respiratory tract or erythrocytes. HA has at least 18 different antigens. These subtypes are named H1 through H18. NCRs can recognize viral proteins. NKp46 has been shown to be able to interact with the HA of influenza and the HA-NA of Paramyxovirus, including Sendai virus and Newcastle disease virus. Besides NKp46, NKp44 can also functionally interact with HA of different influenza subtypes.

[0713] Provided herein are, inter alia, multispecific (e.g., bi-, tri-, quad-specific) or multifunctional molecules that are engineered to contain one or more NK cell engagers that mediate binding to and/or activation of an NK cell. Accordingly, in some embodiments, the NK cell engager is selected from an antigen binding domain or ligand that binds to (e.g., activates): NKp30, NKp40, NKp44, NKp46, NKG2D, DNAM1, DAP10, CD16 (e.g., CD16a, CD16b, or both), CRTAM, CD27, PSGL1, CD96, CD100 (SEMA4D), NKp80, CD244 (also known as SLAMF4 or 2B4), SLAMF6, SLAMF7, KIR2DS2, KIR2DS4, KIR3DS1, KIR2DS3, KIR2DS5, KIR2DS1, CD94, NKG2C, NKG2E, or CD160.

[0714] In some embodiments, the NK cell engager is a ligand of NKp30 is a B7-6, e.g., comprises the amino acid sequence of: DLKVEMMAGGTQITPLNDNVTIFCNIFYSQPLNITSMGITWFWKSLTFDKEVKVFEFFGDHQEAFRPG AIVSPWRLKSGDASLRLPGIQLEEAGEYRCEVVVTPLKAQGTVQLEVVASPASRLLLDQVGMKENE DKYMCESSGFYPEAINITWEKQTQKFPHPIEISEDVITGPTIKNMDGTFNVTSCLKLNSSQEDPGTVYQ CVVRHASLHTPLRSNFTLTAARHSLSETEKTDNFS (SEQ ID NO: 3291), a fragment thereof, or an amino acid sequence substantially identical thereto (e.g., 95% to 99.9% identical thereto, or having at least one amino acid alteration, but not more than five, ten or fifteen alterations (e.g., substitutions, deletions, or insertions, e.g., conservative substitutions) to the amino acid sequence of SEQ ID NO: 3291.

[0715] In other embodiments, the NK cell engager is a ligand of NKp44 or NKp46, which is a viral HA. Viral hemagglutinins (HA) are glyco proteins which are on the surface of viruses. HA proteins allow viruses to bind to the membrane of cells via sialic acid sugar moieties which contributes to the fusion of viral membranes with the cell membranes (see e.g., Eur J Immunol. 2001 September: 31 (9): 2680-9 “Recognition of viral hemagglutinins by NKp44 but not by NKp30”; and Nature. 2001 Feb. 22; 409 (6823): 1055-60 “Recognition of haemagglutinins on virus-infected cells by NKp46 activates lysis by human NK cells” the contents of each of which are incorporated by reference herein).

[0716] In other embodiments, the NK cell engager is a ligand of NKG2D chosen from MICA, MICB, or ULBP1, e.g., wherein: (i) MICA comprises the amino acid sequence: EPHSLRYNLTVLSWDGSVQSGFLTEVHLDGQPFLRCDRQKCRAKPQGQWAEDVLGNKTWDRETRD LTGNGKDLRMTLAHIKDQKEGLHSLQEIRVCEIHEDNSTRSSQHFYYDGELFLSQNLETKEWTMPQS SRAQTLAMNVRNFLKEDAMKTKTHYHAMHADCLQELRRYLKSGVVLRRTVPPMVNVTRSEASEG NITVTCRASGFYPWNITLSWRQDGVSLSHDTQQWGDVLPDGNGTYQTWVATRICQGEEQRFTCYM EHSGNHSTHPVPSGKVLVLQSHW (SEQ ID NO: 3292), a fragment thereof, or an amino acid sequence substantially identical thereto (e.g., 95% to 99.9% identical thereto, or having at least one amino acid alteration, but not more than five, ten or fifteen alterations (e.g., substitutions, deletions, or insertions, e.g., conservative substitutions) to the amino acid sequence of SEQ ID NO: 3292; (ii) MICB comprises the amino acid sequence: AEPHSLRYNLMVLSQDESVQSGFLAEGHLDGQPFLRYDRQKRRAKPQGQWAEDVLGAKTWDTETE DLTENGQDLRRTLTHIKDQKGGLHSLQEIRVCEIHEDSSTRGSRHFYYDGELFLSQNLETQESTVPQSS RAQTLAMNVTNFWKEDAMKTKTHYRAMQADCLQKLQRYLKSGVAIRRTVPPMVNVTCSEVSEGN ITVTCRASSFYPRNITLTWRQDGVSLSHNTQQWGDVLPDGNGTYQTWVATRIRQGEEQRFTCYMEH SGNHGTHPVPSGKVLVLQSQRTD (SEQ ID NO: 3293), a fragment thereof, or an amino acid sequence substantially identical thereto (e.g., 95% to 99.9% identical thereto, or having at least one amino acid alteration, but not more than five, ten or fifteen alterations (e.g., substitutions, deletions, or insertions, e.g., conservative substitutions) to the amino acid sequence of SEQ ID NO: 3293; or (iii) ULBP1 comprises the amino acid sequence: GWVDTHCLCYDFIITPKSRPEPQWCEVQGLVDERPFLHYDCVNHKAKAFASLGKKVNVTKTWEEQT ETLRDVVDFLKGQLLDIQVENLIPIEPLTLQARMSCEHEAHGHGRGSWQFLFNGQKFLLFDSNNRKW TALHPGAKKMTEKWEKNRDVTMFFQKISLGDCKMWLEEFLMYWEQMLDPTKPPSLAPG (SEQ ID NO: 3294), a fragment thereof, or an amino acid sequence substantially identical thereto (e.g., 95% to 99.9% identical thereto, or having at least one amino acid alteration, but not more than five, ten or fifteen alterations (e.g., substitutions, deletions, or insertions, e.g., conservative substitutions) to the amino acid sequence of SEQ ID NO: 3294.

[0717] In other embodiments, the NK cell engager is a ligand of DNAM1 chosen from NECTIN2 or NECL5, e.g., wherein: (i) NECTIN2 comprises the amino acid sequence: QDVRVQVLPEVRGQLGGTVELPCHLLPPVPGLYISLVTWQRPDAPANHQNVAAFHPKMGPSFPSPKP GSERLSFVSAKQSTGQDTEAELQDATLALHGLTVEDEGNYTCEFATFPKGSVRGMTWLRVIAKPKN QAEAQKVTFSQDPTTVALCISKEGRPPARISWLSSLDWEAKETQVSGTLAGTVTVTSRFTLVPSGRAD GVTVTCKVEHESFEEPALIPVTLSVRYPPEVSISGYDDNWYLGRTDATLSCDVRSNPEPTGYDWSTTS GTFPTSAVAQGSQLVIHAVDSLFNTTFVCTVTNAVGMGRAEQVIFVRETPNTAGAGATGG (SEQ ID NO: 3295), a fragment thereof, or an amino acid sequence substantially identical thereto (e.g., 95% to 99.9% identical thereto, or having at least one amino acid alteration, but not more than five, ten or fifteen alterations (e.g., substitutions, deletions, or insertions, e.g., conservative substitutions) to the amino acid sequence of SEQ ID NO: 3295; or (ii) NECL5 comprises the amino acid sequence: WPPPGTGDVVVQAPTQVPGFLGDSVTLPCYLQVPNMEVTHVSQLTWARHGESGSMAVFHQTQGPS YSESKRLEFVAARLGAELRNASLRMFGLRVEDEGNYTCLFVTFPQGSRSVDIWLRVLAKPQNTAEV QKVQLTGEPVPMARCVSTGGRPPAQITWHSDLGGMPNTSQVPGFLSGTVTVTSLWILVPSSQVDGK NVTCKVEHESFEKPQLLTVNLTVYYPPEVSISGYDNNWYLGQNEATLTCDARSNPEPTGYNWSTTM GPLPPFAVAQGAQLLIRPVDKPINTTLICNVTNALGARQAELTVQVKEGPPSEHSGISRN (SEQ ID NO: 3296), a fragment thereof, or an amino acid sequence substantially identical thereto (e.g., 95% to 99.9% identical thereto, or having at least one amino acid alteration, but not more than five, ten or fifteen alterations (e.g., substitutions, deletions, or insertions, e.g., conservative substitutions) to the amino acid sequence of SEQ ID NO: 3296.

[0718] In yet other embodiments, the NK cell engager is a ligand of DAP10, which is an adapter for NKG2D (see e.g., Proc Natl Acad Sci USA. 2005 May 24; 102(21): 7641-7646; and Blood, 15 Sep. 2011 Volume 118, Number 11, the full contents of each of which is incorporated by reference herein).

[0719] In other embodiments, the NK cell engager is a ligand of CD16, which is a CD16a/b ligand, e.g., a CD 16a/b ligand further comprising an antibody Fc region (see e.g., Front Immunol. 2013; 4: 76 discusses how antibodies use the Fc to trigger NK cells through CD16, the full contents of which are incorporated herein).

[0720] In other embodiments, the NK cell engager is a ligand of CRTAM, which is NECL2, e.g., wherein NECL2 comprises the amino acid sequence: QNLFTKDVTVIEGEVATISCQVNKSDDSVIQLLNPNRQTIYFRDFRPLKDSRFQLLNFSSSELKVSLTN VSISDEGRYFCQLYTDPPQESYTTITVLVPPRNLMIDIQKDTAVEGEEIEVNCTAMASKPATTIRWFKG NTELKGKSEVEEWSDMYTVTSQLMLKVHKEDDGVPVICQVEHPAVTGNLQTQRYLEVQYKPQVHI QMTYPLQGLTREGDALELTCEAIGKPQPVMVTWVRVDDEMPQHAVLSGPNLFINNLNKTDNGTYR CEASNIVGKAHSDYMLYVYDPPTTIPPPTTTTTTTTTTTTTILTIITDSRAGEEGSIRAVDH (SEQ ID NO: 3297), a fragment thereof, or an amino acid sequence substantially identical thereto (e.g. 95% to 99.9% identical thereto, or having at least one amino acid alteration, but not more than five, ten or fifteen alterations (e.g., substitutions, deletions, or insertions, e.g., conservative substitutions) to the amino acid sequence of SEQ ID NO: 3297.

[0721] In other embodiments, the NK cell engager is a ligand of CD27, which is CD70, e.g., wherein CD70 comprises the amino acid sequence: QRFAQAQQQLPLESLGWDVAELQLNHTGPQQDPRLYWQGGPALGRSFLHGPELDKGQLRIHRDGIY MVHIQVTLAICSSTTASRHHPTTLAVGICSPASRSISLLRLSFHQGCTIASQRLTPLARGDTLCTNLTGT LLPSRNTDETFFGVQWVRP (SEQ ID NO: 3298), a fragment thereof, or an amino acid sequence substantially identical thereto (e.g., 95% to 99.9% identical thereto, or having at least one amino acid alteration, but not more than five, ten or fifteen alterations (e.g., substitutions, deletions, or insertions, e.g., conservative substitutions) to the amino acid sequence of SEQ ID NO: 3298.

[0722] In other embodiments, the NK cell engager is a ligand of PSGL1, which is L-selectin (CD62L), e.g., wherein L-selectin comprises the amino acid sequence: WTYHYSEKPMNWQRARRFCRDNYTDLVAIQNKAEIEYLEKTLPFSRSYYWIGIRKIGGIWTWVGTN KSLTEEAENWGDGEPNNKKNKEDCVEIYIKRNKDAGKWNDDACHKLKAALCYTASCQPWSCSGH GECVEIINNYTCNCDVGYYGPQCQFVIQCEPLEAPELGTMDCTHPLGNFSFSSQCAFSCSEGTNLTGIE ETTCGPFGNWSSPEPTCQVIQCEPLSAPDLGIMNCSHPLASFSFTSACTFICSEGTELIGKKKTICESSGI WSNPSPICQKLDKSFSMIKEGDYN (SEQ ID NO: 3299), a fragment thereof, or an amino acid sequence substantially identical thereto (e.g., 95% to 99.9% identical thereto, or having at least one amino acid alteration, but not more than five, ten or fifteen alterations (e.g., substitutions, deletions, or insertions, e.g., conservative substitutions) to the amino acid sequence of SEQ ID NO: 3299.

[0723] In other embodiments, the NK cell engager is a ligand of CD96, which is NECL5, e.g., wherein NECL5 comprises the amino acid sequence: WPPPGTGDVVVQAPTQVPGFLGDSVTLPCYLQVPNMEVTHVSQLTWARHGESGSMAVFHQTQGPS YSESKRLEFVAARLGAELRNASLRMFGLRVEDEGNYTCLFVTFPQGSRSVDIWLRVLAKPQNTAEV QKVQLTGEPVPMARCVSTGGRPPAQITWHSDLGGMPNTSQVPGFLSGTVTVTSLWILVPSSQVDGK NVTCKVEHESFEKPQLLTVNLTVYYPPEVSISGYDNNWYLGQNEATLTCDARSNPEPTGYNWSTTM GPLPPFAVAQGAQLLIRPVDKPINTTLICNVTNALGARQAELTVQVKEGPPSEHSGISRN (SEQ ID NO: 3296), a fragment thereof, or an amino acid sequence substantially identical thereto (e.g., 95% to 99.9% identical thereto, or having at least one amino acid alteration, but not more than five, ten or fifteen alterations (e.g., substitutions, deletions, or insertions, e.g., conservative substitutions) to the amino acid sequence of SEQ ID NO: 3296.

[0724] In other embodiments, the NK cell engager is a ligand of CD100 (SEMA4D), which is CD72, e.g., wherein CD72 comprises the amino acid sequence: RYLQVSQQLQQTNRVLEVTNSSLRQQLRLKITQLGQSAEDLQGSRRELAQSQEALQVEQRAHQAAE GQLQACQADRQKTKETLQSEEQQRRALEQKLSNMENRLKPFFTCGSADTCCPSGWIMHQKSCFYISL TSKNWQESQKQCETLSSKLATFSEIYPQSHSYYFLNSLLPNGGSGNSYWTGLSSNKDWKLTDDTQRT RTYAQSSKCNKVHKTWSWWTLESESCRSSLPYICEMTAFRFPD (SEQ ID NO: 3300), a fragment thereof, or an amino acid sequence substantially identical thereto (e.g., 95% to 99.9% identical thereto, or having at least one amino acid alteration, but not more than five, ten or fifteen alterations (e.g., substitutions, deletions, or insertions, e.g., conservative substitutions) to the amino acid sequence of SEQ ID NO: 3300.

[0725] In other embodiments, the NK cell engager is a ligand of NKp80, which is CLEC2B (AICL), e.g., wherein CLEC2B (AICL) comprises the amino acid sequence: KLTRDSQSLCPYDWIGFQNKCYYFSKEEGDWNSSKYNCSTQHADLTIIDNIEEMNFLRRYKCSSDHW IGLKMAKNRTGQWVDGATFTKSFGMRGSEGCAYLSDDGAATARCYTERKWICRKRIH (SEQ ID NO: 3301), a fragment thereof, or an amino acid sequence substantially identical thereto (e.g., 95% to 99.9% identical thereto, or having at least one amino acid alteration, but not more than five, ten or fifteen alterations (e.g., substitutions, deletions, or insertions, e.g., conservative substitutions) to the amino acid sequence of SEQ ID NO: 3301.

[0726] In other embodiments, the NK cell engager is a ligand of CD244, which is CD48, e.g., wherein CD48 comprises the amino acid sequence: QGHLVHMTVVSGSNVTLNISESLPENYKQLTWFYTFDQKIVEWDSRKSKYFESKFKGRVRLDPQSG ALYISKVQKEDNSTYIMRVLKKTGNEQEWKIKLQVLDPVPKPVIKIEKIEDMDDNCYLKLSCVIPGES VNYTWYGDKRPFPKELQNSVLETTLMPHNYSRCYTCQVSNSVSSKNGTVCLSPPCTLARS (SEQ ID NO: 3302), a fragment thereof, or an amino acid sequence substantially identical thereto (e.g., 95% to 99.9% identical thereto, or having at least one amino acid alteration, but not more than five, ten or fifteen alterations (e.g., substitutions, deletions, or insertions, e.g., conservative substitutions) to the amino acid sequence of SEQ ID NO: 3302.

### T Cell Engagers

[0727] Provided herein are, inter alia, multispecific (e.g., bi-, tri-, quad-specific) or multifunctional molecules that are engineered to further contain one or more T cell engager that mediate binding to and/or activation of a T cell. In some embodiments, the T cell engager is an antigen binding domain that binds to, e.g., activates TCRβ, e.g., a TCRβV region, as described herein. In some embodiments, the T cell engager is selected from an antigen binding domain or ligand that binds to (e.g., and in some embodiments activates) one or more of CD3, TCRα, TCRγ, TCRζ, ICOS, CD28, CD27, HVEM, LIGHT, CD40, 4-1BB, OX40, DR3, GITR, CD30, TIM1, SLAM, CD2, or CD226. In other embodiments, the T cell engager is selected from an antigen binding domain or ligand that binds to and does not activate one or more of CD3, TCRα, TCRγ, TCRζ, ICOS, CD28, CD27, HVEM, LIGHT, CD40, 4-1BB, OX40, DR3, GITR, CD30, TIM1, SLAM, CD2, or CD226.

### B Cell, Macrophage & Dendritic Cell Engagers

[0728] Broadly, B cells, also known as B lymphocytes, are a type of white blood cell of the lymphocyte subtype. They function in the humoral immunity component of the adaptive immune system by secreting antibodies. Additionally, B cells present antigen (they are also classified as professional antigen-presenting cells (APCs)) and secrete cytokines. Macrophages are a type of white blood cell that engulfs and digests cellular debris, foreign substances, microbes, cancer cells via phagocytosis. Besides phagocytosis, they play important roles in nonspecific defense (innate immunity) and also help initiate specific defense mechanisms (adaptive immunity) by recruiting other immune cells such as lymphocytes. For example, they are important as antigen presenters to T cells. Beyond increasing inflammation and stimulating the immune system, macrophages also play an important anti-inflammatory role and can decrease immune reactions through the release of cytokines. Dendritic cells (DCs) are antigen-presenting cells that function in processing antigen material and present it on the cell surface to the T cells of the immune system.

[0729] Provided herein are, inter alia, multispecific (e.g., bi-, tri-, quad-specific) or multifunctional molecules that further include, e.g., are engineered to contain, one or more B cell, macrophage, and/or dendritic cell engager that mediate binding to and/or activation of a B cell, macrophage, and/or dendritic cell.

[0730] Accordingly, in some embodiments, the immune cell engager comprises a B cell, macrophage, and/or dendritic cell engager chosen from one or more of CD40 ligand (CD40L) or a CD70 ligand; an antibody molecule that binds to CD40 or CD70; an antibody molecule to OX40; an OX40 ligand (OX40L); an agonist of a Toll-like receptor (e.g., as described herein, e.g., a TLR4, e.g., a constitutively active TLR4 (caTLR4), or a TLR9 agonists); a 41BB; a CD2; a CD47; or a STING agonist, or a combination thereof.

[0731] In some embodiments, the B cell engager is a CD40L, an OX40L, or a CD70 ligand, or an antibody molecule that binds to OX40, CD40 or CD70.

[0732] In some embodiments, the macrophage engager is a CD2 agonist. In some embodiments, the macrophage engager is an antigen binding domain that binds to: CD40L or antigen binding domain or ligand that binds CD40, a Toll like receptor (TLR) agonist (e.g., as described herein), e.g., a TLR9 or TLR4 (e.g., caTLR4 (constitutively active TLR4), CD47, or a STING agonist. In some embodiments, the STING agonist is a cyclic dinucleotide, e.g., cyclic di-GMP (cdGMP) or cyclic di-AMP (cdAMP). In some embodiments, the STING agonist is biotinylated.

[0733] In some embodiments, the dendritic cell engager is a CD2 agonist. In some embodiments, the dendritic cell engager is a ligand, a receptor agonist, or an antibody molecule that binds to one or more of: OX40L, 41BB, a TLR agonist (e.g., as described herein) (e.g., TLR9 agonist. TLR4 (e.g., caTLR4 (constitutively active TLR4)). CD47, or and a STING agonist. In some embodiments, the STING agonist is a cyclic dinucleotide, e.g., cyclic di-GMP (cdGMP) or cyclic di-AMP (cdAMP). In some embodiments, the STING agonist is biotinylated.

[0734] In other embodiments, the immune cell engager mediates binding to, or activation of, one or more of a B cell, a macrophage, and/or a dendritic cell. Exemplary B cell, macrophage, and/or dendritic cell engagers can be chosen from one or more of CD40 ligand (CD40L) or a CD70 ligand; an antibody molecule that binds to CD40 or CD70; an antibody molecule to OX40; an OX40 ligand (OX40L): a Toll-like receptor agonist (e.g., a TLR4, e.g., a constitutively active TLR4 (caTLR4) or a TLR9 agonist); a 41BB agonist: a CD2; a CD47; or a STING agonist, or a combination thereof.

[0735] In some embodiments, the B cell engager is chosen from one or more of a CD40L, an OX40L, or a CD70 ligand, or an antibody molecule that binds to OX40, CD40 or CD70.

[0736] In other embodiments, the macrophage cell engager is chosen from one or more of a CD2 agonist: a CD40L; an OX40L; an antibody molecule that binds to OX40, CD40 or CD70; a Toll-like receptor agonist or a fragment thereof (e.g., a TLR4, e.g., a constitutively active TLR4 (caTLR4)): a CD47 agonist; or a STING agonist.

[0737] In other embodiments, the dendritic cell engager is chosen from one or more of a CD2 agonist, an OX40 antibody, an OX40L, 41BB agonist, a Toll-like receptor agonist or a fragment thereof (e.g., a TLR4. e.g., a constitutively active TLR4 (caTLR4)), CD47 agonist, or a STING agonist.

[0738] In some embodiments, the OX40L comprises the amino acid sequence: QVSHRYPRIQSIKVQFTEYKKEKGFILTSQKEDEIMKVQNNSVIINCDGFYLISLKGYFSQEVNISLHY QKDEEPLFQLKKVRSVNSLMVASLTYKDKVYLNVTTDNTSLDDFHVNGGELILIHQNPGEFCVL (SEQ ID NO: 3303), a fragment thereof, or an amino acid sequence substantially identical thereto (e.g., 95% to 99.9% identical thereto, or having at least one amino acid alteration, but not more than five, ten or fifteen alterations (e.g., substitutions, deletions, or insertions, e.g., conservative substitutions) to the amino acid sequence of SEQ ID NO: 3303.

[0739] In another embodiment, the CD40L comprises the amino acid sequence: MQKGDQNPQIAAHVISEASSKTTSVLQWAEKGYYTMSNNLVTLENGKQLTVKRQGLYYIYAQVTF CSNREASSQAPFIASLCLKSPGRFERILLRAANTHSSAKPCGQQSIHLGGVFELQPGASVFVNVTDPSQ VSHGTGFTSFGLLKL (SEQ ID NO: 3304), a fragment thereof, or an amino acid sequence substantially identical thereto (e.g., 95% to 99.9% identical thereto, or having at least one amino acid alteration, but not more than five, ten or fifteen alterations (e.g., substitutions, deletions, or insertions, e.g., conservative substitutions) to the amino acid sequence of SEQ ID NO: 3304.

[0740] In yet other embodiments, the STING agonist comprises a cyclic dinucleotide, e.g., a cyclic di-GMP (cdGMP), a cyclic di-AMP (cdAMP), or a combination thereof, optionally with 2′,5′ or 3′,5′ phosphate linkages.

[0741] In some embodiments, the immune cell engager includes 41BB ligand, e.g., comprising the amino acid sequence: ACPWAVSGARASPGSAASPRLREGPELSPDDPAGLLDLRQGMFAQLVAQNVLLIDGPLSWYSDPGL AGVSLTGGLSYKEDTKELVVAKAGVYYVFFQLELRRVVAGEGSGSVSLALHLQPLRSAAGAAALAL TVDLPPASSEARNSAFGFQGRLLHLSAGQRLGVHLHTEARARHAWQLTQGATVLGLFRVTPEIPAGL PSPRSE (SEQ ID NO: 3305), a fragment thereof, or an amino acid sequence substantially identical thereto (e.g., 95% to 99.9% identical thereto, or having at least one amino acid alteration, but not more than five, ten or fifteen alterations (e.g., substitutions, deletions, or insertions, e.g., conservative substitutions) to the amino acid sequence of SEQ ID NO: 3305.

[0742] Toll-Like Receptors: Toll-Like Receptors (TLRs) are evolutionarily conserved receptors are homologues of the Drosophila Toll protein, and recognize highly conserved structural motifs known as pathogen-associated microbial patterns (PAMPs), which are exclusively expressed by microbial pathogens, or danger-associated molecular patterns (DAMPs) that are endogenous molecules released from necrotic or dying cells. PAMPs include various bacterial cell wall components such as lipopolysaccharide (LPS), peptidoglycan (PGN) and lipopeptides, as well as flagellin, bacterial DNA and viral double-stranded RNA. DAMPs include intracellular proteins such as heat shock proteins as well as protein fragments from the extracellular matrix. Stimulation of TLRs by the corresponding PAMPs or DAMPs initiates signaling cascades leading to the activation of transcription factors, such as AP-1, NF-κB and interferon regulatory factors (IRFs). Signaling by TLRs results in a variety of cellular responses, including the production of interferons (IFNs), pro-inflammatory cytokines and effector cytokines that direct the adaptive immune response. TLRs are implicated in a number of inflammatory and immune disorders and play a role in cancer (Rakoff-Nahoum S. & Medzhitov R., 2009. Toll-like receptors and cancer. Nat Revs Cancer 9:57-63).

[0743] TLRs are type I transmembrane proteins characterized by an extracellular domain containing leucine-rich repeats (LRRs) and a cytoplasmic tail that contains a conserved region called the Toll/IL-1 receptor (TIR) domain. Ten human and twelve murine TLRs have been characterized, TLR1 to TLR10 in humans, and TLR1 to TLR9, TLR11, TLR12 and TLR13 in mice, the homolog of TLR10 being a pseudogene. TLR2 is essential for the recognition of a variety of PAMPs from Gram-positive bacteria, including bacterial lipoproteins, lipomannans and lipoteichoic acids. TLR3 is implicated in virus-derived double-stranded RNA. TLR4 is predominantly activated by lipopolysaccharide. TLR5 detects bacterial flagellin and TLR9 is required for response to unmethylated CpG DNA. Finally, TLR7 and TLR8 recognize small synthetic antiviral molecules, and single-stranded RNA was reported to be their natural ligand. TLR11 has been reported to recognize uropathogenic E. coli and a profilin-like protein from Toxoplasma gondii. The repertoire of specificities of the TLRs is apparently extended by the ability of TLRs to heterodimerize with one another. For example, dimers of TLR2 and TLR6 are required for responses to diacylated lipoproteins while TLR2 and TLR1 interact to recognize triacylated lipoproteins. Specificities of the TLRs are also influenced by various adapter and accessory molecules, such as MD-2 and CD14 that form a complex with TLR4 in response to LPS.

[0744] TLR signaling consists of at least two distinct pathways: a My D88-dependent pathway that leads to the production of inflammatory cytokines, and a MyD88-independent pathway associated with the stimulation of IFN-β and the maturation of dendritic cells. The MyD88-dependent pathway is common to all TLRs, except TLR3 (Adachi O, et al., 1998. Targeted disruption of the MyD88 gene results in loss of IL-1- and IL-18-mediated function. Immunity. 9 (1): 143-50). Upon activation by PAMPs or DAMPs, TLRs hetero- or homodimerize inducing the recruitment of adaptor proteins via the cytoplasmic TIR domain. Individual TLRs induce different signaling responses by usage of the different adaptor molecules. TLR4 and TLR2 signaling requires the adaptor TIRAP/Mal, which is involved in the MyD88-dependent pathway. TLR3 triggers the production of IFN-β in response to double-stranded RNA, in a MyD88-independent manner, through the adaptor TRIF/TICAM-1. TRAM/TICAM-2 is another adaptor molecule involved in the MyD88-independent pathway which function is restricted to the TLR4 pathway.

[0745] TLR3, TLR7, TLR8 and TLR9 recognize viral nucleic acids and induce type I IFNs. The signaling mechanisms leading to the induction of type I IFNs differ depending on the TLR activated. They involve the interferon regulatory factors, IRFs, a family of transcription factors known to play a critical role in antiviral defense, cell growth and immune regulation. Three IRFs (IRF3, IRF5 and IRF7) function as direct transducers of virus-mediated TLR signaling. TLR3 and TLR4 activate IRF3 and IRF7, while TLR7 and TLR8 activate IRF5 and IRF7 (Doyle S, et al. 2002. IRF3 mediates a TLR3/TLR4-specific antiviral gene program. Immunity 17 (3): 251-63) Furthermore, type I IFN production stimulated by TLR9 ligand CpG-A has been shown to be mediated by PI(3)K and mTOR (Costa-Mattioli M. & Sonenberg N. 2008. RAPping production of type I interferon in pDC's through mTOR. Nature Immunol. 9:1097-1099).

[0746] TLR-9: TLR9 recognizes unmethylated CpG sequences in DNA molecules. CpG sites are relatively rare (˜1%) on vertebrate genomes in comparison to bacterial genomes or viral DNA. TLR9 is expressed by numerous cells of the immune system such as B lymphocytes, monocytes, natural killer (NK) cells, and plasmacytoid dendritic cells. TLR9 is expressed intracellularly, within the endosomal compartments and functions to alert the immune system of viral and bacterial infections by binding to DNA rich in CpG motifs. TLR9 signals leads to activation of the cells initiating pro-inflammatory reactions that result in the production of cytokines such as type-1 interferon and IL-12.

[0747] TLR Agonists: a TLR agonist can agonize one or more TLR, e.g., one or more of human TLR-1, 2, 3, 4, 5, 6, 7, 8, 9, or 10. In some embodiments, an adjunctive agent described herein is a TLR agonist. In some embodiments, the TLR agonist specifically agonizes human TLR-9. In some embodiments, the TLR-9 agonist is a CpG moiety. As used herein, a CpG moiety, is a linear dinucleotide having the sequence: 5′-C-phosphate-G-3′, that is, cytosine and guanine separated by only one phosphate. In some embodiments, the CpG moiety comprises at least 1, 2, 3, 4, 5, 6, 7, 8, 9, 10, 11, 12, 13, 14, 15, 16, 17, 18, 19, 20, 21, 22, 23, 24, 25, 26, 27, 28, 29, 30, or more CpG dinucleotides. In some embodiments, the CpG moiety consists of 1, 2, 3, 4, 5, 6, 7, 8, 9, 10, 11, 12, 13, 14, 15, 16, 17, 18, 19, 20, 21, 22, 23, 24, 25, 26, 27, 28, 29, or 30 CpG dinucleotides. In some embodiments, the CpG moiety has 1-5, 1-10, 1-20, 1-30, 1-40, 1-50, 5-10, 5-20, 5-30, 10-20, 10-30, 10-40, or 10-50 CpG dinucleotides. In some embodiments, the TLR-9 agonist is a synthetic ODN (oligodeoxynucleotides). CpG ODNs are short synthetic single-stranded DNA molecules containing unmethylated CpG dinucleotides in particular sequence contexts (CpG motifs). CpG ODNs possess a partially or completely phosphorothioated (PS) backbone, as opposed to the natural phosphodiester (PO) backbone found in genomic bacterial DNA. There are three major classes of CpG ODNs: classes A, B and C, which differ in their immunostimulatory activities. CpG-A ODNs are characterized by a PO central CpG-containing palindromic motif and a PS-modified 3″ poly-G string. They induce high IFN-α production from pDCs but are weak stimulators of TLR9-dependent NF-κB signaling and pro-inflammatory cytokine (e.g. IL-6) production. CpG-B ODNs contain a full PS backbone with one or more CpG dinucleotides. They strongly activate B cells and TLR9-dependent NF-κB signaling but weakly stimulate IFN-α secretion. CpG-C ODNs combine features of both classes A and B. They contain a complete PS backbone and a CpG-containing palindromic motif. C-Class CpG ODNs induce strong IFN-α production from pDC as well as B cell stimulation.

### Stromal Modifying Moieties

[0748] In some embodiments, the multifunctional molecule further includes a stromal modifying moiety. A “stromal modifying moiety.” as used herein refers to an agent, e.g., a protein (e.g., an enzyme), that is capable of altering, e.g., degrading a component of, the stroma. In embodiments, the component of the stroma is chosen from, e.g., an ECM component, e.g., a glycosaminoglycan, e.g., hyaluronan (also known as hyaluronic acid or HA), chondroitin sulfate, chondroitin, dermatan sulfate, heparin sulfate, heparin, entactin, tenascin, aggrecan and keratin sulfate; or an extracellular protein, e.g. collagen, laminin, elastin, fibrinogen, fibronectin, and vitronectin.

[0749] Solid tumors have a distinct structure that mimics that of normal tissues and comprises two distinct but interdependent compartments: the parenchyma (neoplastic cells) and the stroma that the neoplastic cells induce and in which they are dispersed. All tumors have stroma and require stroma for nutritional support and for the removal of waste products. In the case of tumors which grow as cell suspensions (e.g., leukemias, ascites tumors), the blood plasma serves as stroma (Connolly J L et al. Tumor Structure and Tumor Stroma Generation. In: Kufe D W et al., editors. Holland-Frei Cancer Medicine. 6th edition. Hamilton. B C Decker; 2003). The stroma includes a variety of cell types, including fibroblasts/myofibroblasts, glial, epithelial, fat, vascular, smooth muscle, and immune cells along with extracellular matrix (ECM) and extracellular molecules (Li Hanchen et al. Tumor Microenvironment: The Role of the Tumor Stroma in Cancer. J of Cellular Biochemistry 101:805-815 (2007)).

[0750] Stromal modifying moieties described herein include moieties (e.g., proteins, e.g., enzymes) capable of degrading a component of the stroma, e.g., an ECM component, e.g., a glycosaminoglycan, e.g., hyaluronan (also known as hyaluronic acid or HA), chondroitin sulfate, chondroitin, dermatan sulfate, heparin sulfate, heparin, entactin, tenascin, aggrecan and keratin sulfate; or an extracellular protein, e.g., collagen, laminin, elastin, fibrinogen, fibronectin, and vitronectin.

### Stromal Modifying Enzymes

[0751] In some embodiments, the stromal modifying moiety is an enzyme. For example, the stromal modifying moiety can include, but is not limited to a hyaluronidase, a collagenase, a chondroitinase, a matrix metalloproteinase (e.g., macrophage metalloelastase).

### Hyaluronidases

[0752] Hyaluronidases are a group of neutral- and acid-active enzymes found throughout the animal kingdom. Hyaluronidases vary with respect to substrate specificity, and mechanism of action. There are three general classes of hyaluronidases: (1) Mammalian-type hyaluronidases, (EC 3.2.1.35) which are endo-beta-N-acetylhexosaminidases with tetrasaccharides and hexasaccharides as the major end products. They have both hydrolytic and transglycosidase activities, and can degrade hyaluronan and chondroitin sulfates: (2) Bacterial hyaluronidases (EC 4.2.99.1) degrade hyaluronan and, and to various extents, chondroitin sulfate and dermatan sulfate. They are endo-beta-N-acetylhexosaminidases that operate by a beta elimination reaction that yields primarily disaccharide end products: (3) Hyaluronidases (EC 3.2.1.36) from leeches, other parasites, and crustaceans are endo-beta-glucuronidases that generate tetrasaccharide and hexasaccharide end products through hydrolysis of the beta 1-3 linkage.

[0753] Mammalian hyaluronidases can be further divided into two groups: (1) neutral active and (2) acid active enzymes. There are six hyaluronidase-like genes in the human genome, HYAL1, HYAL2, HYAL3 HYAL4 HYALP1 and PH20/SPAM1. HYALP1 is a pseudogene, and HYAL3 has not been shown to possess enzyme activity toward any known substrates. HYAL4 is a chondroitinase and lacks activity towards hyaluronan. HYAL1 is the prototypical acid-active enzyme and PH20 is the prototypical neutral-active enzyme. Acid active hyaluronidases, such as HYAL1 and HYAL2 lack catalytic activity at neutral pH. For example, HYAL1 has no catalytic activity in vitro over pH 4.5 (Frost and Stern, “A Microtiter-Based Assay for Hyaluronidase Activity Not Requiring Specialized Reagents”, Analytical Biochemistry, vol. 251, pp. 263-269 (1997). HYAL2 is an acid active enzyme with a very low specific activity in vitro.

[0754] In some embodiments the hyaluronidase is a mammalian hyaluronidase. In some embodiments the hyaluronidase is a recombinant human hyaluronidase. In some embodiments, the hyaluronidase is a neutral active hyaluronidase. In some embodiments, the hyaluronidase is a neutral active soluble hyaluronidase. In some embodiments, the hyaluronidase is a recombinant PH20 neutral-active enzyme. In some embodiments, the hyaluronidase is a recombinant PH20 neutral-active soluble enzyme. In some embodiments the hyaluronidase is glycosylated. In some embodiments, the hyaluronidase possesses at least one N-linked glycan. A recombinant hyaluronidase can be produced using conventional methods known to those of skill in the art, e.g., U.S. Pat. No. 7,767,429, the entire contents of which are incorporated by reference herein.

[0755] In some embodiments the hyaluronidase is rHuPH20 (also referred to as Hylenex®; presently manufactured by Halozyme; approved by the FDA in 2005 (see e.g., Scodeller P (2014) Hyaluronidase and other Extracellular Matrix Degrading Enzymes for Cancer Therapy: New Uses and Nano-Formulations J Carcinog Mutage 5:178; U.S. Pat. Nos. 7,767,429; 8,202,517; 7,431,380; 8,450,470; 8,772,246; 8,580,252, the entire contents of each of which is incorporated by reference herein), rHuPH20 is produced by genetically engineered CHO cells containing a DNA plasmid encoding for a soluble fragment of human hyaluronidase PH20. In some embodiments the hyaluronidase is glycosylated. In some embodiments, the hyaluronidase possesses at least one N-linked glycan. A recombinant hyaluronidase can be produced using conventional methods known to those of skill in the art, e.g., U.S. Pat. No. 7,767,429, the entire contents of which are incorporated by reference herein. In some embodiments, rHuPH20 has a sequence at least 95% (e.g., at least 96%, 97%, 98%, 99%, 100%) identical to the amino acid sequence of

(SEQ ID NO: 3306)
LNFRAPPVIPNVPFLWAWNAPSEFCLGKFDEPLDMSLFSFIGSPRINAT
GQGVTIFYVDRLGYYPYIDSITGVTVNGGIPQKISLQDHLDKAKKDITF
YMPVDNLGMAVIDWEEWRPTWARNWKPKDVYKNRSIELVQQQNVQLSLT
EATEKAKQEFEKAGKDFLVETIKLGKLLRPNHLWGYYLFPDCYNHHYKK
PGYNGSCFNVEIKRNDDLSWLWNESTALYPSIYLNTQQSPVAATLYVRN
RVREAIRVSKIPDAKSPLPVFAYTRIVFTDQVLKFLSQDELVYTFGETV
ALGASGIVIWGTLSIMRSMKSCLLLDNYMETILNPYIINVTLAAKMCSQ
VLCQEQGVCIRKNWNSSDYLHLNPDNFAIQLEKGGKFTVRGKPTLEDLE
QFSEKFYCSCYSTLSCKEKADVKDTDAVDVCIADGVCIDAFLKPPMETE
EPQIFYNASPSTLS.

[0756] In any of the methods provided herein, the anti-hyaluronan agent can be an agent that degrades hyaluronan or can be an agent that inhibits the synthesis of hyaluronan. For example, the anti-hyaluronan agent can be a hyaluronan degrading enzyme. In another example, the anti-hyaluronan agent or is an agent that inhibits hyaluronan synthesis. For example, the anti-hyaluronan agent is an agent that inhibits hyaluronan synthesis such as a sense or antisense nucleic acid molecule against an HA synthase or is a small molecule drug. For example, an anti-hyaluronan agent is 4-methylumbelliferone (MU) or a derivative thereof, or leflunomide or a derivative thereof. Such derivatives include, for example, a derivative of 4-methylumbelliferone (MU) that is 6,7-dihydroxy-4-methyl coumarin or 5,7-dihydroxy-4-methyl coumarin.

[0757] In further examples of the methods provided herein, the hyaluronan degrading enzyme is a hyaluronidase. In some examples, the hyaluronan-degrading enzyme is a PH20 hyaluronidase or truncated form thereof to lacking a C-terminal glycosylphosphatidylinositol (GPI) attachment site or a portion of the GPI attachment site. In specific examples, the hyaluronidase is a PH20 selected from a human, monkey, bovine, ovine, rat, mouse or guinea pig PH20. For example, the hyaluronan-degrading enzyme is a human PH20 hyaluronidase that is neutral active and N-glycosylated and is selected from among (a) a hyaluronidase polypeptide that is a full-length PH20 or is a C-terminal truncated form of the PH20, wherein the truncated form includes at least amino acid residues 36-464 of SEQ ID NO: 139, such as 36-481, 36-482, 36-483, where the full-length PH20 has the sequence of amino acids set forth in SEQ ID NO: 139; or (b) a hyaluronidase polypeptide comprising a sequence of amino acids having at least 85%, 86%, 87%, 88%, 89%, 90%, 91%, 92%, 93%, 94%, 95%, 96%, 97%, 98%, 99% or more sequence identity with the polypeptide or truncated form of sequence of amino acids set forth in SEQ ID NO: 139; or (c) a hyaluronidase polypeptide of (a) or (b) comprising amino acid substitutions, whereby the hyaluronidase polypeptide has a sequence of amino acids having at least 85%, 86%, 87%, 88%, 89%, 90%, 91%, 92%, 93%, 94%, 95%, 96%, 97%, 98%, 99% or more sequence identity with the polypeptide set forth in SEQ ID NO: 139 or the with the corresponding truncated forms thereof. In exemplary examples, the hyaluronan-degrading enzyme is a PH20 that comprises a composition designated rHuPH20.

[0758] In other examples, the anti-hyaluronan agent is a hyaluronan degrading enzyme that is modified by conjugation to a polymer. The polymer can be a PEG and the anti-hyaluronan agent a PEGylated hyaluronan degrading enzyme. Hence, in some examples of the methods provided herein the hyaluronan-degrading enzyme is modified by conjugation to a polymer. For example, the hyaluronan-degrading enzyme is conjugated to a PEG, thus the hyaluronan degrading enzyme is PEGylated. In an exemplary example, the hyaluronan-degrading enzyme is a PEGylated PH20 enzyme (PEGPH20). In the methods provided herein, the corticosteroid can be a glucocorticoid that is selected from among cortisones, dexamethasones, hydrocortisones, methylprednisolones, prednisolones and prednisones.

### Chondroitinases

[0759] Chondroitinases are enzymes found throughout the animal kingdom which degrade glycosaminoglycans, specifically chondroitins and chondroitin sulfates, through an endoglycosidase reaction. In some embodiments the chondroitinase is a mammalian chondroitinase. In some embodiments the chondroitinase is a recombinant human chondroitinase. In some embodiments the chondroitinase is HYAL4. Other exemplary chondroitinases include chondroitinase ABC (derived from Proteus vulgaris; Japanese Patent Application Laid-open No 6-153947. T. Yamagata et al. J. Biol. Chem., 243, 1523 (1968). S. Suzuki et al, J. Biol. Chem., 243, 1543 (1968)), chondroitinase AC (derived from Flavobacterium heparinum; T. Yamagata et al., J. Biol. Chem., 243, 1523 (1968)), chondroitinase AC II (derived from Arthrobacter aurescens; K. Hiyama, and S. Okada. J. Biol. Chem., 250, 1824 (1975), K. Hiyama and S. Okada, J. Biochem. (Tokyo), 80, 1201 (1976)), Hyaluronidase ACIII (derived from Flavobacterium sp. Hp 102; Hirofumi Miyazono et al., Seikagaku, 61, 1023 (1989)), chondroitinase B (derived from Flavobacterium heparinum; Y. M. Michelacci and C. P. Dietrich, Biochem. Biophys. Res. Commun., 56, 973 (1974), Y. M. Michelacci and C. P. Dietrich. Biochem. J., 151, 121 (1975), Kenichi Maeyama et al, Seikagaku, 57, 1189 (1985)), chondroitinase C (derived from Flavobacterium sp. Hp102; Hirofumi Miyazono et al. Seikagaku, 61, 1023 (1939)), and the like.

### Matrix Metalloproteinases

[0760] Matrix metalloproteases (MMPs) are zinc-dependent endopeptidases that are the major proteases involved in extracellular matrix (ECM) degradation. MMPs are capable of degrading a wide range of extracellular molecules and a number of bioactive molecules. Twenty-four MMP genes have been identified in humans, which can be organized into six groups based on domain organization and substrate preference: Collagenases (MMP-1, -8 and -13), Gelatinases (MMP-2 and MMP-9), Stromelysins (MMP-3, -10 and -11), Matrilysin (MMP-7 and MMP-26), Membrane-type (MT)-MMPs (MMP-14, -15, -16, -17, -24 and -25) and others (MMP-12, -19, -20, -21, -23, -27 and -28). In some embodiments, the stromal modifying moiety is a human recombinant MMP (e.g., MMP-1, -2, -3, -4, -5, -6, -7, -8, -9, 10, -11, -12, -13, -14, 15, -15, -17, -18, -19, 20, -21, -22, -23, or -24).

### Collagenases

[0761] The three mammalian collagenases (MMP-1, -8, and -13) are the principal secreted endopeptidases capable of cleaving collagenous extracellular matrix. In addition to fibrillar collagens, collagenases can cleave several other matrix and non-matrix proteins including growth factors. Collagenases are synthesized as inactive pro-forms, and once activated, their activity is inhibited by specific tissue inhibitors of metalloproteinases. TIMPs, as well as by non-specific proteinase inhibitors (Ala-aho R et al. Biochimie. Collagenases in cancer. 2005 March-April: 87 (3-4): 273-86) In some embodiments, the stromal modifying moiety is a collagenase. In some embodiments, the collagenase is a human recombinant collagenase. In some embodiments, the collagenase is MMP-1. In some embodiments, the collagenase is MMP-8. In some embodiments, the collagenase is MMP-13.

### Macrophage Metalloelastase

[0762] Macrophage metalloelastase (MME), also known as MMP-12, is a member of the stromelysin subgroup of MMPs and catalyzes the hydrolysis of soluble and insoluble elastin and a broad selection of matrix and nonmatrix substrates including type IV collagen, fibronectin, laminin, vitronectin, entactin, heparan, and chondroitin sulfates (Erja Kerkelä et al. Journal of Investigative Dermatology (2000) 114, 1113-1119; doi:10.1046/j. 1523-1747.2000.00993). In some embodiments, the stromal modifying moiety is a MME. In some embodiments, the MME is a human recombinant MME. In some embodiments, the MME is MMP-12.

### Additional Stromal Modifying Moieties

[0763] In some embodiments, the stromal modifying moiety causes one or more of: decreases the level or production of a stromal or extracellular matrix (ECM) component: decreases tumor fibrosis; increases interstitial tumor transport; improves tumor perfusion; expands the tumor microvasculature; decreases interstitial fluid pressure (IFP) in a tumor; or decreases or enhances penetration or diffusion of an agent, e.g., a cancer therapeutic or a cellular therapy, into a tumor or tumor vasculature.

[0764] In some embodiments, the stromal or ECM component decreased is chosen from a glycosaminoglycan or an extracellular protein, or a combination thereof. In some embodiments, the glycosaminoglycan is chosen from hyaluronan (also known as hyaluronic acid or HA), chondroitin sulfate, chondroitin, dermatan sulfate, heparin, heparin sulfate, entactin, tenascin, aggrecan and keratin sulfate. In some embodiments, the extracellular protein is chosen from collagen, laminin, elastin, fibrinogen, fibronectin, or vitronectin. In some embodiments, the stromal modifying moiety includes an enzyme molecule that degrades a tumor stroma or extracellular matrix (ECM). In some embodiments, the enzyme molecule is chosen from a hyaluronidase molecule, a collagenase molecule, a chondroitinase molecule, a matrix metalloproteinase molecule (e.g., macrophage metalloelastase), or a variant (e.g., a fragment) of any of the aforesaid. The term “enzyme molecule” includes a full length, a fragment or a variant of the enzyme, e.g., an enzyme variant that retains at least one functional property of the naturally-occurring enzyme.

[0765] In some embodiments, the stromal modifying moiety decreases the level or production of hyaluronic acid. In other embodiments, the stromal modifying moiety comprises a hyaluronan degrading enzyme, an agent that inhibits hyaluronan synthesis, or an antibody molecule against hyaluronic acid.

[0766] In some embodiments, the hyaluronan degrading enzyme is a hyaluronidase molecule, e.g., a full length or a variant (e.g., fragment thereof) thereof. In some embodiments, the hyaluronan degrading enzyme is active in neutral or acidic pH, e.g., pH of about 4-5. In some embodiments, the hyaluronidase molecule is a mammalian hyaluronidase molecule, e.g., a recombinant human hyaluronidase molecule, e.g., a full length or a variant (e.g., fragment thereof, e.g., a truncated form) thereof. In some embodiments, the hyaluronidase molecule is chosen from HYAL1, HYAL2, or PH-20/SPAM1, or a functional fragment or a functional variant thereof (e.g., a truncated form thereof). In some embodiments, the truncated form lacks a C-terminal glycosylphosphatidylinositol (GPI) attachment site or a portion of the GPI attachment site. In some embodiments, the hyaluronidase molecule is glycosylated, e.g., comprises at least one N-linked glycan.

[0767] In some embodiments, the hyaluronidase molecule comprises the amino acid sequence: LNFRAPPVIPNVPFLWAWNAPSEFCLGKFDEPLDMSLFSFIGSPRINATGQGVTIFYVDRLGYYPYIDSI TGVTVNGGIPQKISLQDHLDKAKKDITFYMPVDNLGMAVIDWEEWRPTWARNWKPKDVYKNRSIE LVQQQNVQLSLTEATEKAKQEFEKAGKDFLVETIKLGKLLRPNHLWGYYLFPDCYNHHYKKPGYN GSCFNVEIKRNDDLSWLWNESTALYPSIYLNTQQSPVAATLYVRNRVREAIRVSKIPDAKSPLPVFAY TRIVFTDQVLKFLSQDELVYTFGETVALGASGIVIWGTLSIMRSMKSCLLLDNYMETILNPYIINVTLA AKMCSQVLCQEQGVCIRKNWNSSDYLHLNPDNFAIQLEKGGKFTVRGKPTLEDLEQFSEKFYCSCYS TLSCKEKADVKDTDAVDVCIADGVCIDAFLKPPMETEEPQIFYNASPSTLS (SEQ ID NO:3311), or a fragment thereof, or an amino acid sequence substantially identical thereto (e.g., 95% to 99.9% identical thereto, or having at least one amino acid alteration, but not more than five, ten or fifteen alterations (e.g., substitutions, deletions, or insertions, e.g., conservative substitutions) to the amino acid sequence of SEQ ID NO: 3311.

[0768] In some embodiments, the hyaluronidase molecule comprises: (i) the amino acid sequence of 36-464 of SEQ ID NO: 3311; (ii) the amino acid sequence of 36-481, 36-482, or 36-483 of PH20, wherein PH20 has the sequence of amino acids set forth in SEQ ID NO: 3311; or (iii) an amino acid sequence having at least 95% to 100% sequence identity to the polypeptide or truncated form of sequence of amino acids set forth in SEQ ID NO: 3311; or (iv) an amino acid sequence having 30, 20, 10, 5 or fewer amino acid substitutions to the amino acid sequence set forth in SEQ ID NO: 3311. In some embodiments, the hyaluronidase molecule comprises an amino acid sequence at least 95% (e.g., at least 95%, 96%, 97%, 98%, 99%, 100%) identical to the amino acid sequence of SEQ ID NO: 3311. In some embodiments, the hyaluronidase molecule is encoded by a nucleotide sequence at least 95% (e.g., at least 96%, 97%, 98%, 99%, 100%) identical to the nucleotide sequence of SEQ ID NO: 3311.

[0769] In some embodiments, the hyaluronidase molecule is PH20, e.g., rHuPH20. In some embodiments, the hyaluronidase molecule is HYAL1 and comprises the amino acid sequence: FRGPLLPNRPFTTVWNANTQWCLERHGVDVDVSVFDVVANPGQTFRGPDMTIFYSSQGTYPYYTPT GEPVFGGLPQNASLIAHLARTFQDILAAIPAPDFSGLAVIDWEAWRPRWAFNWDTKDIYRQRSRALV QAQHPDWPAPQVEAVAQDQFQGAARAWMAGTLQLGRALRPRGLWGFYGFPDCYNYDFLSPNYTG QCPSGIRAQNDQLGWLWGQSRALYPSIYMPAVLEGTGKSQMYVQHRVAEAFRVAVAAGDPNLPVL PYVQIFYDTTNHFLPLDELEHSLGESAAQGAAGVVLWVSWENTRTKESCQAIKEYMDTTLGPFILNV TSGALLCSQALCSGHGRCVRRTSHPKALLLLNPASFSIQLTPGGGPLSLRGALSLEDQAQMAVEFKCR CYPGWQAPWCERKSMW (SEQ ID NO: 3312), or a fragment thereof, or an amino acid sequence substantially identical thereto (e.g., 95% to 99.9% identical thereto, or having at least one amino acid alteration, but not more than five, ten or fifteen alterations (e.g., substitutions, deletions, or insertions, e.g., conservative substitutions) to the amino acid sequence of SEQ ID NO: 3312.

[0770] In some embodiments, the hyaluronan degrading enzyme, e.g., the hyaluronidase molecule, further comprises a polymer, e.g., is conjugated to a polymer, e.g., PEG. In some embodiments, the hyaluronan-degrading enzyme is a PEGylated PH20 enzyme (PEGPH20). In some embodiments, the hyaluronan degrading enzyme, e.g., the hyaluronidase molecule, further comprises an immunoglobulin chain constant region (e.g., Fc region) chosen from, e.g., the heavy chain constant regions of IgG1, IgG2, IgG3, and IgG4, more particularly, the heavy chain constant region of human IgG1, IgG2, IgG3, or IgG4. In some embodiments, the immunoglobulin constant region (e.g., the Fc region) is linked, e.g., covalently linked to, the hyaluronan degrading enzyme, e.g., the hyaluronidase molecule. In some embodiments, the immunoglobulin chain constant region (e.g., Fc region) is altered, e.g., mutated, to increase or decrease one or more of: Fc receptor binding, antibody glycosylation, the number of cysteine residues, effector cell function, or complement function. In some embodiments, the hyaluronan degrading enzyme, e.g., the hyaluronidase molecule forms a dimer.

[0771] In some embodiments, the stromal modifying moiety comprises an inhibitor of the synthesis of hyaluronan, e.g., an HA synthase. In some embodiments, the inhibitor comprises a sense or an antisense nucleic acid molecule against an HA synthase or is a small molecule drug. In some embodiments, the inhibitor is 4-methylumbelliferone (MU) or a derivative thereof (e.g., 6,7-dihydroxy-4-methyl coumarin or 5,7-dihydroxy-4-methyl coumarin), or leflunomide or a derivative thereof.

[0772] In some embodiments, the stromal modifying moiety comprises antibody molecule against hyaluronic acid.

[0773] In some embodiments, the stromal modifying moiety comprises a collagenase molecule, e.g., a mammalian collagenase molecule, or a variant (e.g., fragment) thereof. In some embodiments, the collagenase molecule is collagenase molecule IV, e.g., comprising the amino acid sequence of: YNFFPRKPKWDKNQITYRIIGYTPDLDPETVDDAFARAFQVWSDVTPLRFSRIHDGEADIMINFGRWE HGDGYPFDGKDGLLAHAFAPGTGVGGDSHFDDDELWTLGEGQVVRVKYGNADGEYCKFPFLFNG KEYNSCTDTGRSDGFLWCSTTYNFEKDGKYGFCPHEALFTMGGNAEGQPCKFPFRFQGTSYDSCTT EGRTDGYRWCGTTEDYDRDKKYGFCPETAMSTVGGNSEGAPCVFPFTFLGNKYESCTSAGRSDGK MWCATTANYDDDRKWGFCPDQGYSLFLVAAHEFGHAMGLEHSQDPGALMAPIYTYTKNFRLSQD DIKGIQELYGASPDIDLGTGPTPTLGPVTPEICKQDIVFDGIAQIRGEIFFFKDRFIWRTVTPRDKPMGPL LVATFWPELPEKIDAVYEAPQEEKAVFFAGNEYWIYSASTLERGYPKPLTSLGLPPDVQRVDAAFNW SKNKKTYIFAGDKFWRYNEVKKKMDPGFPKLIADAWNAIPDNLDAVVDLQGGGHSYFFKGAYYLK LENQSLKSVKFGSIKSDWLGC (SEQ ID NO: 3313), or a fragment thereof, or an amino acid sequence substantially identical thereto (e.g., 95% to 99.9% identical thereto, or having at least one amino acid alteration, but not more than five, ten or fifteen alterations (e.g., substitutions, deletions, or insertions, e.g., conservative substitutions) to the amino acid sequence of SEQ ID NO: 3313.

### Tumor Antigen Moiety

[0774] In some embodiments, the multifunctional molecule further includes a tumor antigen moiety. In some embodiments, the tumor-associated antigen binding moiety is an antigen, e.g., a cancer antigen. In some embodiments, the cancer antigen is a tumor antigen or stromal antigen, or a hematological antigen.

[0775] “Cancer” as used herein can encompass all types of oncogenic processes and/or cancerous growths. In embodiments, cancer includes primary tumors as well as metastatic tissues or malignantly transformed cells, tissues, or organs. In embodiments, cancer encompasses all histopathologies and stages, e.g., stages of invasiveness/severity, of a cancer. In embodiments, cancer includes relapsed and/or resistant cancer. The terms “cancer” and “tumor” can be used interchangeably. For example, both terms encompass solid and liquid tumors. As used herein, the term “cancer” or “tumor” includes premalignant, as well as malignant cancers and tumors. As used herein, the terms “tumor antigen”, “tumor-associated antigen”, and “tumor associate antigen” can be used interchangeably. As used herein, the terms “tumor-targeting moiety” and “the tumor-associated antigen binding moiety” can be used interchangeably.

[0776] In some embodiments, the tumor-associated antigen binding moiety, e.g., cancer antigen, is chosen from: BCMA, FcRH5, CD19, CD20, CD22, CD30, CD33, CD38. CD47, CD99, CD 123, FcRH5, CLEC12, CD179A, SLAMF7, or NY-ESO1, PDL1, CD47, gangloside 2 (GD2), prostate stem cell antigen (PSCA), prostate specific membrane antigen (PMSA), prostate-specific antigen (PSA), carcinoembryonic antigen (CEA), Ron Kinase, c-Met, Immature laminin receptor, TAG-72, BING-4, Calcium-activated chloride channel 2, Cyclin-B1, 9D7, Ep-CAM, EphA3, Her2/neu, Telomerase, SAP-1, Survivin, NY-ESO-1/LAGE-1, PRAME, SSX-2, Melan-A/MART-1, Gp100/pmel17, Tyrosinase, TRP-1/-2, MC1R, β-catenin, BRCA1/2, CDK4, CML66, Fibronectin, p53, Ras, TGF-B receptor, AFP, ETA, MAGE, MUC-1, CA-125, BAGE, GAGE, NY-ESO-1, β-catenin, CDK4, CDC27, α actinin-4, TRP 1/gp75, TRP2, gp100, Melan-A/MARTI, gangliosides, WT1, EphA3, Epidermal growth factor receptor (EGFR), MART-2, MART-1, MUC1, MUC2, MUM1, MUM2, MUM3, NA88-1, NPM, OA1, OGT, RCC, RUI1, RUI2, SAGE, TRG, TRP1, TSTA, Folate receptor alpha, L1-CAM, CAIX, gpA33, GD3, GM2, VEGFR, Integrins (Integrin alphaVbeta3, Integrin alpha5Beta1), Carbohydrates (Le), IGF1R, EPHA3, TRAILR1, TRAILR2, RANKL, (FAP), TGF-beta, hyaluronic acid, collagen, e.g., collagen IV, tenascin C, or tenascin W. In some embodiments, the tumor-associated antigen binding moiety, e.g., cancer antigen, is BCMA. In some embodiments, the tumor-associated antigen binding moiety, e.g., cancer antigen, is FcRH5.

[0777] In some embodiments, the tumor-associated antigen binding moiety binds to a cancer antigen chosen from: CD19, CD123, CD22, CD30, CD171, CS-1, C-type lectin-like molecule-1, CD33, epidermal growth factor receptor variant III (EGFRvIII), ganglioside G2 (GD2), ganglioside GD3, TNF receptor family member B cell maturation (BCMA), Tn antigen ((Tn Ag) or (GalNAcα-Ser/Thr)), prostate-specific membrane antigen (PSMA), Receptor tyrosine kinase-like orphan receptor 1 (ROR1), Fms-Like Tyrosine Kinase 3 (FLT3), Tumor-associated glycoprotein 72 (TAG72), CD38. CD44v6. Carcinoembryonic antigen (CEA), Epithelial cell adhesion molecule (EPCAM), B7H3 (CD276). KIT (CD117). Interleukin-13 receptor subunit alpha-2, mesothelin. Interleukin 11 receptor alpha (IL-11Ra), prostate stem cell antigen (PSCA), Protease Serine 21, vascular endothelial growth factor receptor 2 (VEGFR2), Lewis (Y) antigen, CD24, Platelet-derived growth factor receptor beta (PDGFR-beta), Stage-specific embryonic antigen-4 (SSEA-4), CD20, Folate receptor alpha, Receptor tyrosine-protein kinase ERBB2 (Her2/neu), Mucin 1, cell surface associated (MUC1), epidermal growth factor receptor (EGFR), neural cell adhesion molecule (NCAM), Prostase, prostatic acid phosphatase (PAP), elongation factor 2 mutated (ELF2M), Ephrin B2, fibroblast activation protein alpha (FAP), insulin-like growth factor 1 receptor (IGF-I receptor), carbonic anhydrase IX (CAIX), Proteasome (Prosome, Macropain) Subunit. Beta Type, 9 (LMP2), glycoprotein 100 (gp100), oncogene fusion protein consisting of breakpoint cluster region (BCR) and Abelson murine leukemia viral oncogene homolog 1 (Abl) (bcr-abl), tyrosinase, ephrin type-A receptor 2 (EphA2), Fucosyl GM1, sialyl Lewis adhesion molecule (sLe), ganglioside GM3, transglutaminase 5 (TGS5), high molecular weight-melanoma-associated antigen (HMWMAA), o-acetyl-GD2 ganglioside (OAcGD2), Folate receptor beta, tumor endothelial marker 1 (TEM1/CD248), tumor endothelial marker 7-related (TEM7R), claudin 6 (CLDN6), thyroid stimulating hormone receptor (TSHR), G protein-coupled receptor class C group 5, member D (GPRC5D), chromosome X open reading frame 61 (CXORF61), CD97, CD179a, anaplastic lymphoma kinase (ALK), Polysialic acid, placenta-specific 1 (PLAC1), hexasaccharide portion of globoH glycoceramide (GloboH), mammary gland differentiation antigen (NY-BR-1), uroplakin 2 (UPK2), Hepatitis A virus cellular receptor 1 (HAVCR1), adrenoceptor beta 3 (ADRB3), pannexin 3 (PANX3). G protein-coupled receptor 20 (GPR20), lymphocyte antigen 6 complex, locus K 9 (LY6K), Olfactory receptor 51E2 (OR51E2), TCR Gamma Alternate Reading Frame Protein (TARP). Wilms tumor protein (WT1), Cancer/testis antigen 1 (NY-ESO-1). Cancer/testis antigen 2 (LAGE-1a), Melanoma-associated antigen 1 (MAGE-A1). ETS translocation-variant gene 6, located on chromosome 12p (ETV6-AML), sperm protein 17 (SPA 17), X Antigen Family, Member 1A (XAGE1), angiopoietin-binding cell surface receptor 2 (Tie 2), melanoma cancer testis antigen-1 (MAD-CT-1), melanoma cancer testis antigen-2 (MAD-CT-2), Fos-related antigen 1, tumor protein p53 (p53), p53 mutant, prostein, surviving, telomerase, prostate carcinoma tumor antigen-1, melanoma antigen recognized by T cells 1, Rat sarcoma (Ras) mutant, human Telomerase reverse transcriptase (hTERT), sarcoma translocation breakpoints, melanoma inhibitor of apoptosis (ML-IAP), ERG (transmembrane protease, serine 2 (TMPRSS2) ETS fusion gene), N-Acetyl glucosaminyl-transferase V (NA 17), paired box protein Pax-3 (PAX3), Androgen receptor, Cyclin B1, v-myc avian myelocytomatosis viral oncogene neuroblastoma derived homolog (MYCN), Ras Homolog Family Member C (RhoC), Tyrosinase-related protein 2 (TRP-2). Cytochrome P450 1B1 (CYP1B1), CCCTC-Binding Factor (Zinc Finger Protein)-Like, Squamous Cell Carcinoma Antigen Recognized By T Cells 3 (SART3), Paired box protein Pax-5 (PAX5), proacrosin binding protein sp32 (OY-TES1), lymphocyte-specific protein tyrosine kinase (LCK), A kinase anchor protein 4 (AKAP-4), synovial sarcoma. X breakpoint 2 (SSX2), Receptor for Advanced Glycation Endproducts (RAGE-1), renal ubiquitous 1 (RU1), renal ubiquitous 2 (RU2), legumain, human papilloma virus E6 (HPV E6), human papilloma virus E7 (HPV E7), intestinal carboxyl esterase, heat shock protein 70-2 mutated (mut hsp70-2), CD79a, CD79b, CD72, Leukocyte-associated immunoglobulin-like receptor 1 (LAIR1), Fc fragment of IgA receptor (FCAR or CD89), Leukocyte immunoglobulin-like receptor subfamily A member 2 (LILRA2). CD300 molecule-like family member f (CD300LF), C-type lectin domain family 12 member A (CLEC12A), bone marrow stromal cell antigen 2 (BST2), EGF-like module-containing mucin-like hormone receptor-like 2 (EMR2), lymphocyte antigen 75 (LY75), Glypican-3 (GPC3), Fc receptor-like 5 (FCRL5), or immunoglobulin lambda-like polypeptide 1 (IGLL1).

### FcRH5 Targeting Moieties:

[0778] In some embodiments, the multispecific molecules as described herein include a targeting moiety that binds to FcRH5 (e.g., a FcRH5 targeting moiety). The FcRH5 targeting moiety can be chosen from an antibody molecule (e.g., an antigen binding domain as described herein), a receptor or a receptor fragment, or a ligand or a ligand fragment, or a combination thereof. In some embodiments, the FcRH5 targeting moiety associates with, e.g., binds to, a cancer or hematopoietic cell (e.g., a molecule, e.g., antigen, present on the surface of the cancer or hematopoietic cell). In certain embodiments, the FcRH5 targeting moiety targets, e.g., directs the multispecific molecules as described herein to a cancer or hematopoietic cell. In some embodiments, the cancer is a hematological cancer, e.g., multiple myeloma.

[0779] In some embodiments, the multispecific molecule, e.g., the FcRH5 targeting moiety, binds to a FcRH5 antigen on the surface of a cell, e.g., a cancer or hematopoietic cell. The FcRH5 antigen can be present on a primary tumor cell, or a metastatic lesion thereof. In some embodiments, the cancer is a hematological cancer, e.g., multiple myeloma. For example, the FcRH5 antigen can be present on a tumor, e.g., a tumor of a class typified by having one or more of: limited tumor perfusion, compressed blood vessels, or fibrotic tumor interstitium.

[0780] The multispecific molecules described herein includes a FcRH5 targeting moiety that comprises an anti-FcRH5 antibody or antigen-binding fragment thereof described in U.S. Pat. No. 7,999,077, US20150098900, U.S. Pat. No. 8,299,220. U.S. Pat. Nos. 7,105,149, 8,362,213, 8,466,260. U.S. Pat. No. 8,617,559, US20160368985, US20150166661, and US20080247944, the entire contents of any of the aforesaid publications are herein incorporated by reference.

[0781] In some embodiments, the multispecific molecules described herein includes a FcRH5 targeting moiety that comprises an anti-FcRH5 antibody or antigen-binding fragment thereof described in U.S. Pat. No. 7,999,077, the entire contents of which are herein incorporated by reference.

### BCMA Targeting Moieties:

[0782] In certain embodiments, the multispecific molecules as described herein include a targeting moiety that binds to BCMA (e.g., a BCMA targeting moiety). The BCMA targeting moiety can be chosen from an antibody molecule (e.g., an antigen binding domain as described herein), a receptor or a receptor fragment, or a ligand or a ligand fragment, or a combination thereof. In some embodiments, the BCMA targeting moiety associates with, e.g., binds to, a cancer or hematopoietic cell (e.g., a molecule, e.g., antigen, present on the surface of the cancer or hematopoietic cell). In certain embodiments, the BCMA targeting moiety targets, e.g. directs the multispecific molecules as described herein to a cancer or hematopoietic cell. In some embodiments, the cancer is a hematological cancer, e.g., multiple myeloma.

[0783] In some embodiments, the multispecific molecule, e.g., the BCMA targeting moiety, binds to a BCMA antigen on the surface of a cell, e.g., a cancer or hematopoietic cell. The BCMA antigen can be present on a primary tumor cell, or a metastatic lesion thereof. In some embodiments, the cancer is a hematological cancer, e.g., multiple myeloma. For example, the BCMA antigen can be present on a tumor, e.g., a tumor of a class typified by having one or more of: limited tumor perfusion, compressed blood vessels, or fibrotic tumor interstitium.

[0784] Exemplary BCMA targeting moieties: the multispecific molecules described herein can include a BCMA targeting moiety that comprises an anti-BCMA antibody or antigen-binding fragment thereof described in U.S. Pat. Nos. 8,920,776, 9,243,058, 9,340,621, 8,846,042, 7,083,785, 9,545,086, 7,276,241, 9,034,324, 7,799,902, 9,387,237. U.S. Pat. No. 8,821,883. U.S. Pat. No. 861,745, US20130273055, US20160176973. US20150368351, US20150376287, US20170022284, US20160015749, US20140242077, US20170037128, US20170051068, US20160368988, US20160311915, US20160131654, US20120213768, US20110177093, US20160297885, EP3137500, EP2699259, EP2982694, EP3029068, EP3023437, WO2016090327, WO2017021450, WO2016110584, WO2016118641, WO2016168149, the entire contents of which are incorporated herein by reference.

[0785] In some embodiments, the BCMA-targeting moiety includes an antibody molecule (e.g., Fab or scFv) that binds to BCMA. In some embodiments, the antibody molecule to BCMA comprises one, two, or three CDRs from any of the heavy chain variable domain sequences of Table 1, or a closely related CDR, e.g., CDRs which have at least one amino acid alteration, but not more than two, three or four alterations (e.g., substitutions, deletions, or insertions, e.g., conservative substitutions) from any of the CDR sequences of Table 15. In some embodiments, the antibody molecule to BCMA comprises a heavy chain variable domain sequence chosen from any of the amino acid sequences of Table 15, or an amino acid sequence substantially identical thereto (e.g., 95% to 99.9% identical thereto, or having at least one amino acid alteration, but not more than five, ten or fifteen alterations (e.g., substitutions, deletions, or insertions, e.g., conservative substitutions)).

[0786] Alternatively, or in combination with the heavy chain to BCMA as described herein, the antibody molecule to BCMA comprises one, two, or three CDRs from any of the light chain variable domain sequences of Table 15, or a closely related CDR, e.g., CDRs which have at least one amino acid alteration, but not more than two, three or four alterations (e.g., substitutions, deletions, or insertions, e.g., conservative substitutions) from any of the CDR sequences of Table 15. In some embodiments, the antibody molecule to BCMA comprises a light chain variable domain sequence chosen from any of the amino acid sequences of Table 15, or an amino acid sequence substantially identical thereto (e.g., 95% to 99.9% identical thereto, or having at least one amino acid alteration, but not more than five, ten or fifteen alterations (e.g., substitutions, deletions, or insertions, e.g., conservative substitutions)).

### Tumor-Targeting Moieties

[0787] In some embodiments, the multifunctional or multispecific (e.g., bi-, tri-, tetra-specific) molecules as described herein further include, e.g., are engineered to further contain, one or more tumor specific targeting moieties that direct the molecule to a tumor cell.

[0788] In certain embodiments, the multispecific molecules as described herein further include a tumor-targeting moiety. The tumor targeting moiety can be chosen from an antibody molecule (e.g., an antigen binding domain as described herein), a receptor or a receptor fragment, or a ligand or a ligand fragment, or a combination thereof. In some embodiments, the tumor targeting moiety associates with, e.g., binds to, a tumor cell (e.g., a molecule, e.g., antigen, present on the surface of the tumor cell). In certain embodiments, the tumor targeting moiety targets, e.g., directs the multispecific molecules as described herein to a cancer (e.g., a cancer or tumor cells) In some embodiments, the cancer is chosen from a hematological cancer, a solid cancer, a metastatic cancer, or a combination thereof.

[0789] In some embodiments, the multispecific molecule, e.g., the tumor-associated antigen binding moiety, binds to a solid tumor antigen or a stromal antigen. The solid tumor antigen or stromal antigen can be present on a solid tumor, or a metastatic lesion thereof. In some embodiments, the solid tumor is chosen from one or more of pancreatic (e.g., pancreatic adenocarcinoma), breast, colorectal, lung (e.g., small or non-small cell lung cancer), skin, ovarian, or liver cancer. In some embodiments, the solid tumor is a fibrotic or desmoplastic solid tumor. For example, the solid tumor antigen or stromal antigen can be present on a tumor, e.g., a tumor of a class typified by having one or more of: limited tumor perfusion, compressed blood vessels, or fibrotic tumor interstitium.

[0790] In certain embodiments, the solid tumor antigen is chosen from one or more of: PDL1, CD47, ganglioside 2 (GD2), prostate stem cell antigen (PSCA), prostate specific membrane antigen (PMSA), prostate-specific antigen (PSA), carcinoembryonic antigen (CEA), Ron Kinase, c-Met. Immature laminin receptor. TAG-72, BING-4, Calcium-activated chloride channel 2, Cyclin-B1, 9D7, Ep-CAM, EphA3, Her2/neu, Telomerase, SAP-1, Survivin, NY-ESO-1/LAGE-1, PRAME, SSX-2, Melan-A/MART-1, Gp100/pmel17. Tyrosinase, TRP-1/-2, MC1R, β-catenin, BRCA1/2, CDK4, CML66, Fibronectin, p53. Ras, TGF-B receptor. AFP. ETA. MAGE, MUC-1, CA-125, BAGE, GAGE, NY-ESO-1, β-catenin, CDK4, CDC27, CD47, a actinin-4, TRP1/gp75, TRP2, gp100, Melan-A/MARTI, gangliosides, WT1, EphA3. Epidermal growth factor receptor (EGFR), MART-2, MART-1, MUC1, MUC2, MUM1, MUM2, MUM3, NA88-1, NPM, OA1, OGT, RCC, RUI1, RUI2, SAGE, TRG, TRP1, TSTA, Folate receptor alpha, L1-CAM, CAIX, EGFRvIII, gpA33. GD3. GM2. VEGFR, Integrins (Integrin alphaVbeta3, Integrin alpha5Beta1), Carbohydrates (Le), IGF1R, EPHA3, TRAILR1, TRAILR2, or RANKL.

[0791] In other embodiments, the multispecific molecule, e.g., the tumor-associated antigen binding moiety, binds to a molecule, e.g., antigen, present on the surface of a hematological cancer, e.g., a leukemia or a lymphoma. In some embodiments, the hematological cancer is a B-cell or T cell malignancy. In some embodiments, the hematological cancer is chosen from one or more of a Hodgkin's lymphoma. Non-Hodgkin's lymphoma (e.g., B cell lymphoma, diffuse large B cell lymphoma, follicular lymphoma, chronic lymphocytic leukemia, mantle cell lymphoma, marginal zone B-cell lymphoma. Burkitt lymphoma, lymphoplasmacytic lymphoma, hairy cell leukemia), acute myeloid leukemia (AML), chronic myeloid leukemia, myelodysplastic syndrome (MDS), multiple myeloma, or acute lymphocytic leukemia. In embodiments, the cancer is other than acute myeloid leukemia (AML) or myelodysplastic syndrome (MDS). In embodiments, the hematological antigen is chosen from CD47, CD99, CD30, CD38, SLAMF7, or NY-ESO1. In some embodiments, the hematological antigen is chosen from is chosen from one or more of: BCMA. CD19, CD20, CD22, CD33. CD123, FcRH5, CLEC12, or CD179A.

[0792] In some embodiments, the tumor-associated antigen-binding moiety comprises an antibody or an antigen-binding moiety thereof that binds to CD19, CD123, CD22, CD30, CD171, CS-1, C-type lectin-like molecule-1. CD33, CISH, epidermal growth factor receptor variant III (EGFRvIII), ganglioside G2 (GD2), ganglioside GD3, DLL3, CLDN18.2. TNF receptor family member B cell maturation (BCMA), In antigen, prostate-specific membrane antigen (PSMA). Receptor tyrosine kinase-like orphan receptor 1 (ROR1), Fms-Like Tyrosine Kinase 3 (FLT3), Tumor-associated glycoprotein 72 (TAG72), CD38, CD44v6, Carcinoembryonic antigen (CEA), Epithelial cell adhesion molecule (EPCAM), B7H3 (CD276), KIT (CD117), Interleukin-13 receptor subunit alpha-2, mesothelin. Interleukin 11 receptor alpha (IL-11Ra), prostate stem cell antigen (PSCA), Protease Serine 21, vascular endothelial growth factor receptor 2 (VEGFR2), Lewis (Y) antigen, CD24, Platelet-derived growth factor receptor beta (PDGFR-beta). Stage-specific embryonic antigen-4 (SSEA-4). CD20, Folate receptor alpha, Receptor tyrosine-protein kinase ERBB2 (Her2/neu), Mucin 1, cell surface associated (MUC1), epidermal growth factor receptor (EGFR), neural cell adhesion molecule (NCAM), Prostase, prostatic acid phosphatase (PAP), elongation factor 2 mutated (ELF2M), Ephrin B2, fibroblast activation protein alpha (FAP), insulin-like growth factor 1 receptor (IGF-I receptor), carbonic anhydrase IX (CAIX), Proteasome (Prosome, Macropain) Subunit, Beta Type, 9 (LMP2), glycoprotein 100 (gp100), oncogene fusion protein consisting of breakpoint cluster region (BCR) and Abelson murine leukemia viral oncogene homolog 1 (Abl) (bcr-abl), tyrosinase, ephrin type-A receptor 2 (EphA2). Fucosyl GM1, sialyl Lewis adhesion molecule (sLe), ganglioside GM3, transglutaminase 5 (TGS5), high molecular weight-melanoma-associated antigen (HMWMAA), o-acetyl-GD2 ganglioside (OAcGD2). Folate receptor beta, tumor endothelial marker 1 (TEM1/CD248), tumor endothelial marker 7-related (TEM7R), claudin 6 (CLDN6), thyroid stimulating hormone receptor (TSHR), G protein-coupled receptor class C group 5, member D (GPRC5D), chromosome X open reading frame 61 (CXORF61), CD97. CD179a, anaplastic lymphoma kinase (ALK), Polysialic acid, placenta-specific 1 (PLAC1), hexasaccharide portion of globoH glycoceramide (GloboH), mammary gland differentiation antigen (NY-BR-1), uroplakin 2 (UPK2). Hepatitis A virus cellular receptor 1 (HAVCR1), adrenoceptor beta 3 (ADRB3), pannexin 3 (PANX3), G protein-coupled receptor 20 (GPR20), lymphocyte antigen 6 complex, locus K 9 (LY6K), Olfactory receptor 51E2 (OR51E2), TCR Gamma Alternate Reading Frame Protein (TARP). Wilms tumor protein (WT1). Cancer/testis antigen 1 (NY-ESO-1), Cancer/testis antigen 2 (LAGE-1a), Melanoma-associated antigen 1 (MAGE-A1). ETS translocation-variant gene 6, located on chromosome 12p (ETV6-AML), sperm protein 17 (SPA17), X Antigen Family, Member 1A (XAGE1), angiopoietin-binding cell surface receptor 2 (Tie 2), melanoma cancer testis antigen-1 (MAD-CT-1), melanoma cancer testis antigen-2 (MAD-CT-2), Fos-related antigen 1, tumor protein p53 (p53), p53 mutant prostein, survivin, telomerase, prostate carcinoma tumor antigen-1, melanoma antigen recognized by T cells 1, Rat sarcoma (Ras) mutant, human Telomerase reverse transcriptase (hTERT), sarcoma translocation breakpoints, melanoma inhibitor of apoptosis (ML-IAP), ERG (transmembrane protease, serine 2 (TMPRSS2) ETS fusion gene). N-Acetyl glucosaminyl-transferase V (NA17), paired box protein Pax-3 (PAX3), Androgen receptor, Cyclin B1, v-myc avian myelocytomatosis viral oncogene neuroblastoma derived homolog (MYCN), Ras Homolog Family Member C (RhoC), Tyrosinase-related protein 2 (TRP-2), Cytochrome P450 1B1 (CYP1B1), CCCTC-Binding Factor (Zinc Finger Protein)-Like, Squamous Cell Carcinoma Antigen Recognized By T Cells 3 (SART3), Paired box protein Pax-5 (PAX5), proacrosin binding protein sp32 (OY-TES1), lymphocyte-specific protein tyrosine kinase (LCK). A kinase anchor protein 4 (AKAP-4), synovial sarcoma, X breakpoint 2 (SSX2), Receptor for Advanced Glycation Endproducts (RAGE-1), renal ubiquitous 1 (RU1), renal ubiquitous 2 (RU2), legumain, human papilloma virus E6 (HPV E6), human papilloma virus E7 (HPV E7), intestinal carboxyl esterase, heat shock protein 70-2 mutated (mut hsp70-2), CD79a. CD79b, CD72, Leukocyte-associated immunoglobulin-like receptor 1 (LAIR1), Fc fragment of IgA receptor (FCAR or CD89), Leukocyte immunoglobulin-like receptor subfamily A member 2 (LILRA2), CD300 molecule-like family member f (CD300LF). C-type lectin domain family 12 member A (CLEC12A), bone marrow stromal cell antigen 2 (BST2), EGF-like module-containing mucin-like hormone receptor-like 2 (EMR2), lymphocyte antigen 75 (LY75), Glypican-3 (GPC3), Fc receptor-like 5 (FCRL5), or immunoglobulin lambda-like polypeptide 1 (IGLL1) antigen.

### Antibody Molecules

[0793] In some embodiments, the antibody molecule binds to a cancer antigen, e.g., a tumor antigen or a stromal antigen. In some embodiments, the cancer antigen is, e.g., a mammalian, e.g., a human, cancer antigen. In other embodiments, the antibody molecule binds to an immune cell antigen, e.g., a mammalian. e.g., a human, immune cell antigen. For example, the antibody molecule binds specifically to an epitope, e.g., linear or conformational epitope, on the cancer antigen or the immune cell antigen.

[0794] In some embodiments, an antibody molecule is a monospecific antibody molecule and binds a single epitope. E.g., a monospecific antibody molecule having a plurality of immunoglobulin variable domain sequences, each of which binds the same epitope.

[0795] In some embodiments, an antibody molecule is a multispecific or multifunctional antibody molecule. e.g., it comprises a plurality of immunoglobulin variable domains sequences, wherein a first immunoglobulin variable domain sequence of the plurality has binding specificity for a first epitope and a second immunoglobulin variable domain sequence of the plurality has binding specificity for a second epitope. In some embodiments, the first and second epitopes are on the same antigen, e.g., the same protein (or subunit of a multimeric protein). In some embodiments, the first and second epitopes overlap. In some embodiments, the first and second epitopes do not overlap. In some embodiments, the first and second epitopes are on different antigens, e.g., the different proteins (or different subunits of a multimeric protein). In some embodiments, a multispecific antibody molecule comprises a third, fourth or fifth immunoglobulin variable domain. In some embodiments, a multispecific antibody molecule is a bispecific antibody molecule, a trispecific antibody molecule, or a tetraspecific antibody molecule.

[0796] In some embodiments, a multispecific antibody molecule is a bispecific antibody molecule. A bispecific antibody has specificity for no more than two antigens. A bispecific antibody molecule is characterized by a first immunoglobulin variable domain sequence which has binding specificity for a first epitope and a second immunoglobulin variable domain sequence that has binding specificity for a second epitope. In some embodiments, the first and second epitopes are on the same antigen, e.g., the same protein (or subunit of a multimeric protein). In some embodiments, the first and second epitopes overlap. In some embodiments, the first and second epitopes do not overlap. In some embodiments, the first and second epitopes are on different antigens, e.g., the different proteins (or different subunits of a multimeric protein). In some embodiments, a bispecific antibody molecule comprises a heavy chain variable domain sequence and a light chain variable domain sequence which have binding specificity for a first epitope and a heavy chain variable domain sequence and a light chain variable domain sequence which have binding specificity for a second epitope. In some embodiments, a bispecific antibody molecule comprises a half antibody having binding specificity for a first epitope and a half antibody having binding specificity for a second epitope. In some embodiments, a bispecific antibody molecule comprises a half antibody, or fragment thereof, having binding specificity for a first epitope and a half antibody, or fragment thereof, having binding specificity for a second epitope. In some embodiments, a bispecific antibody molecule comprises a scFv or a Fab, or fragment thereof, have binding specificity for a first epitope and a scFv or a Fab, or fragment thereof, have binding specificity for a second epitope.

[0797] In some embodiments, an antibody molecule comprises a diabody, and a single-chain molecule, as well as an antigen-binding fragment of an antibody (e.g., Fab, F(ab′)₂, and Fv). For example, an antibody molecule can include a heavy (H) chain variable domain sequence (abbreviated herein as VH), and a light (L) chain variable domain sequence (abbreviated herein as VL). In some embodiments, an antibody molecule comprises or consists of a heavy chain and a light chain (referred to herein as a half antibody. In another example, an antibody molecule includes two heavy (H) chain variable domain sequences and two light (L) chain variable domain sequence, thereby forming two antigen binding sites, such as Fab, Fab′, F(ab′)₂, Fc, Fd, Fd′, Fv, single chain antibodies (scFv for example), single variable domain antibodies, diabodies (Dab) (bivalent and bispecific), and chimeric (e.g., humanized) antibodies, which may be produced by the modification of whole antibodies or those synthesized de novo using recombinant DNA technologies. These functional antibody fragments retain the ability to selectively bind with their respective antigen or receptor. Antibodies and antibody fragments can be from any class of antibodies including, but not limited to, IgG, IgA, IgM, IgD, and IgE, and from any subclass (e.g. IgG1, IgG2, IgG3, and IgG4) of antibodies. The preparation of antibody molecules can be monoclonal or polyclonal. An antibody molecule can also be a human, humanized, CDR-grafted, or in vitro generated antibody. The antibody can have a heavy chain constant region chosen from, e.g., IgG1, IgG2, IgG3, or IgG4. The antibody can also have a light chain chosen from, e.g., kappa or lambda. The term “immunoglobulin” (Ig) is used interchangeably with the term “antibody” herein.

[0798] Examples of antigen-binding fragments of an antibody molecule include: (i) a Fab fragment, a monovalent fragment consisting of the VL, VH, CL and CH1 domains; (ii) a F(ab′)2 fragment, a bivalent fragment comprising two Fab fragments linked by a disulfide bridge at the hinge region; (iii) a Fd fragment consisting of the VH and CH1 domains; (iv) a Fv fragment consisting of the VL and VH domains of a single arm of an antibody, (v) a diabody (dAb) fragment, which consists of a VH domain; (vi) a camelid or camelized variable domain; (vii) a single chain Fv (scFv), see e.g., Bird et al. (1988) Science 242:423-426; and Huston et al. (1988) Proc. Natl. Acad. Sci. USA 85:5879-5883). (viii) a single domain antibody. These antibody fragments are obtained using conventional techniques known to those with skill in the art, and the fragments are screened for utility in the same manner as are intact antibodies.

[0799] Antibody molecules include intact molecules as well as functional fragments thereof. Constant regions of the antibody molecules can be altered, e.g., mutated, to modify the properties of the antibody (e.g., to increase or decrease one or more of: Fc receptor binding, antibody glycosylation, the number of cysteine residues, effector cell function, or complement function).

[0800] Antibody molecules can also be single domain antibodies. Single domain antibodies can include antibodies whose complementary determining regions are part of a single domain polypeptide. Examples include, but are not limited to, heavy chain antibodies, antibodies naturally devoid of light chains, single domain antibodies derived from conventional 4-chain antibodies, engineered antibodies and single domain scaffolds other than those derived from antibodies. Single domain antibodies may be any of the art, or any future single domain antibodies. Single domain antibodies may be derived from any species including, but not limited to mouse, human, camel, llama, fish, shark, goat, rabbit, and bovine. According to another aspect of the invention, a single domain antibody is a naturally occurring single domain antibody known as heavy chain antibody devoid of light chains. Such single domain antibodies are disclosed in WO 9404678, for example. For clarity reasons, this variable domain derived from a heavy chain antibody naturally devoid of light chain is known herein as a VHH or nanobody to distinguish it from the conventional VH of four chain immunoglobulins. Such a VHH molecule can be derived from antibodies raised in Camelidae species, for example in camel, llama, dromedary, alpaca and guanaco. Other species besides Camelidae may produce heavy chain antibodies naturally devoid of light chain: such VHHs are within the scope of the invention.

[0801] The VH and VL regions can be subdivided into regions of hypervariability, termed “complementarity determining regions” (CDR), interspersed with regions that are more conserved, termed “framework regions” (FR or FW).

[0802] The extent of the framework region and CDRs has been precisely defined by a number of methods (see, Kabat. E. A., et al. (1991) Sequences of Proteins of Immunological Interest, Fifth Edition, U.S. Department of Health and Human Services. NIH Publication No. 91-3242; Chothia, C, et al. (1987) J. Mol. Biol. 196:901-917; and the AbM definition used by Oxford Molecular's AbM antibody modeling software. See, generally, e.g., Protein Sequence and Structure Analysis of Antibody Variable Domains. In: Antibody Engineering Lab Manual (Ed.: Duebel, S, and Kontermann, R., Springer-Verlag, Heidelberg; or by ImMunoGene Tics (IMGT) numbering system).

[0803] The terms “complementarity determining region,” and “CDR,” as used herein refer to the sequences of amino acids within antibody variable regions which confer antigen specificity and binding affinity. In general, there are three CDRs in each heavy chain variable region (HCDR1, HCDR2, HCDR3) and three CDRs in each light chain variable region (LCDR1, LCDR2, LCDR3).

[0804] The precise amino acid sequence boundaries of a given CDR can be determined using any of a number of known schemes, including those described by Kabat et al. (1991), “Sequences of Proteins of Immunological Interest,” 5th Ed. Public Health Service, National Institutes of Health, Bethesda, MD (“Kabat” numbering scheme), Al-Lazikani et al., (1997) JMB 273.927-948 (“Chothia” numbering scheme). As used herein, the CDRs defined according the “Chothia” number scheme are also sometimes referred to as “hypervariable loops.”

[0805] For example, under Kabat, the CDR amino acid residues in the heavy chain variable domain (VH) are numbered 31-35 (HCDR1), 50-65 (HCDR2), and 95-102 (HCDR3); and the CDR amino acid residues in the light chain variable domain (VL) are numbered 24-34 (LCDR1), 50-56 (LCDR2), and 89-97 (LCDR3). Under Chothia, the CDR amino acids in the VH are numbered 26-32 (HCDR1), 52-56 (HCDR2), and 95-102 (HCDR3); and the amino acid residues in VL are numbered 26-32 (LCDR1), 50-52 (LCDR2), and 91-96 (LCDR3).

[0806] Each VH and VL typically includes three CDRs and four FRs, arranged from amino-terminus to carboxy-terminus in the following order: FR1, CDR1, FR2, CDR2, FR3, CDR3, FR4.

[0807] The antibody molecule can be a polyclonal or a monoclonal antibody.

[0808] The terms “monoclonal antibody” or “monoclonal antibody composition” as used herein refer to a preparation of antibody molecules of single molecular composition. A monoclonal antibody composition displays a single binding specificity and affinity for a particular epitope. A monoclonal antibody can be made by hybridoma technology or by methods that do not use hybridoma technology (e.g., recombinant methods).

[0809] The antibody can be recombinantly produced, e.g., produced by phage display or by combinatorial methods, or by yeast display.

[0810] Phage display and combinatorial methods for generating antibodies are known in the art (as described in, e.g., Ladner et al. U.S. Pat. No. 5,223,409; Kang et al. International Publication No. WO 92/18619; Dower et al. International Publication No. WO 91/17271; Winter et al. International Publication WO 92/20791; Markland et al. International Publication No. WO 92/15679; Breitling et al. International Publication WO 93/01288; McCafferty et al. International Publication No. WO 92/01047; Garrard et al. International Publication No. WO 92/09690; Ladner et al. International Publication No WO 90/02809; Fuchs et al. (1991) Bio/Technology 9:1370-1372; Hay et al. (1992) Hum Antibod Hybridomas 3:81-85; Huse et al. (1989) Science 246:1275-1281; Griffths et al. (1993) EMBO) J 12:725-734; Hawkins et al. (1992). J Mol Biol 226:889-896; Clackson et al. (1991) Nature 352:624-628; Gram et al. (1992) PNAS 89:3576-3580; Garrad et al. (1991) Bio/Technology 9:1373-1377; Hoogenboom et al. (1991) Nuc Acid Res 19:4133-4137; and Barbas et al. (1991) PNAS 88:7978-7982, the contents of all of which are incorporated by reference herein).

[0811] The yeast display method for generating or identifying antibodies is known in the art, e.g., as described in Chao et al. (2006) Nature Protocols 1(2):755-68, the entire contents of which is incorporated by reference herein.

[0812] In some embodiments, the antibody is a fully human antibody (e.g., an antibody made in a mouse which has been genetically engineered to produce an antibody from a human immunoglobulin sequence), or a non-human antibody, e.g., a rodent (mouse or rat), goat, primate (e.g., monkey), camel antibody. Preferably, the non-human antibody is a rodent (mouse or rat antibody). Methods of producing rodent antibodies are known in the art.

[0813] Human monoclonal antibodies can be generated using transgenic mice carrying the human immunoglobulin genes rather than the mouse system. Splenocytes from these transgenic mice immunized with the antigen of interest are used to produce hybridomas that secrete human mAbs with specific affinities for epitopes from a human protein (see, e.g., Wood et al. International Application WO 91/00906, Kucherlapati et al. PCT publication WO 91/10741; Lonberg et al. International Application WO 92/03918; Kay et al. International Application 92/03917; Lonberg. N, et al. 1994 Nature 368:856-859; Green. L. L, et al. 1994 Nature Genet. 7:13-21; Morrison, S. L, et al. 1994 Proc. Natl. Acad. Sci. USA 81:6851-6855; Bruggeman et al. 1993 Year Immunol 7:33-40; Tuaillon et al. 1993 PNAS 90:3720-3724; Bruggeman et al. 1991 Eur J Immunol 21:1323-1326).

[0814] An antibody molecule can be one in which the variable region, or a portion thereof, e.g., the CDRs, are generated in a non-human organism, e.g., a rat or mouse. Chimeric, CDR-grafted, and humanized antibodies are within the invention Antibody molecules generated in a non-human organism, e.g., a rat or mouse, and then modified, e.g., in the variable framework or constant region, to decrease antigenicity in a human are within the invention.

[0815] An “effectively human” protein is a protein that does substantially not evoke a neutralizing antibody response, e.g., the human anti-murine antibody (HAMA) response. HAMA can be problematic in a number of circumstances, e.g., if the antibody molecule is administered repeatedly, e.g., in treatment of a chronic or recurrent disease condition. A HAMA response can make repeated antibody administration potentially ineffective because of an increased antibody clearance from the serum (see, e.g., Saleh et al., Cancer Immunol. Immunother., 32: 180-190 (1990)) and also because of potential allergic reactions (see, e.g., LoBuglio et al., Hybridoma. 5:5117-5123 (1986)).

[0816] Chimeric antibodies can be produced by recombinant DNA techniques known in the art (see Robinson et al., International Patent Publication PCT/US86/02269; Akira, et al., European Patent Application 184,187; Taniguchi. M., European Patent Application 171,496; Morrison et al., European Patent Application 173,494; Neuberger et al., International Application WO 86/01533; Cabilly et al. U.S. Pat. No. 4,816,567; Cabilly et al., European Patent Application 125,023; Better et al. (1988 Science 240:1041-1043): Liu et al. (1987) PNAS 84.3439-3443; Liu et al., 1987, J. Immunol. 139:3521-3526; Sun et al. (1987) PNAS 84:214-218; Nishimura et al. 1987, Canc. Res. 47:999-1005; Wood et al. (1985) Nature 314:446-449; and Shaw et al., 1988, J. Natl Cancer Inst. 80:1553-1559).

[0817] A humanized or CDR-grafted antibody will have at least one or two but generally all three recipient CDRs (of heavy and or light immuoglobulin chains) replaced with a donor CDR. The antibody may be replaced with at least a portion of a non-human CDR or only some of the CDRs may be replaced with non-human CDRs. It is only necessary to replace the number of CDRs required for binding to the antigen. Preferably, the donor will be a rodent antibody, e.g., a rat or mouse antibody, and the recipient will be a human framework or a human consensus framework. Typically, the immunoglobulin providing the CDRs is called the “donor” and the immunoglobulin providing the framework is called the “acceptor.” In some embodiments, the donor immunoglobulin is a non-human (e.g., rodent). The acceptor framework is a naturally-occurring (e.g., a human) framework or a consensus framework, or a sequence about 85% or higher, preferably 90%, 95%, 99% or higher identical thereto.

[0818] As used herein, the term “consensus sequence” refers to the sequence formed from the most frequently occurring amino acids (or nucleotides) in a family of related sequences (See e.g., Winnaker. From Genes to Clones (Verlagsgesellschaft. Weinheim, Germany 1987). In a family of proteins, each position in the consensus sequence is occupied by the amino acid occurring most frequently at that position in the family. If two amino acids occur equally frequently, either can be included in the consensus sequence. A “consensus framework” refers to the framework region in the consensus immunoglobulin sequence.

[0819] An antibody molecule can be humanized by methods known in the art (see e.g., Morrison, S. L., 1985, Science 229: 1202-1207, by Oi et al., 1986, BioTechniques 4:214, and by Queen et al. U.S. Pat. Nos. 5,585,089, 5,693,761 and 5,693,762, the contents of all of which are hereby incorporated by reference).

[0820] Humanized or CDR-grafted antibody molecules can be produced by CDR-grafting or CDR substitution, wherein one, two, or all CDRs of an immunoglobulin chain can be replaced. See e.g., U.S. Pat. No. 5,225,539; Jones et al. 1986 Nature 321:552-525; Verhoevan et al. 1988 Science 239:1534; Beidler et al. 1988 J. Immunol. 141:4053-4060. Winter U.S. Pat. No. 5,225,539, the contents of all of which are hereby expressly incorporated by reference. Winter describes a CDR-grafting method which may be used to prepare the humanized antibodies of the present invention (UK Patent Application GB 2188638A, filed on Mar. 26, 1987; Winter U.S. Pat. No. 5,225,539), the contents of which is expressly incorporated by reference.

[0821] Also within the scope of the invention are humanized antibody molecules in which specific amino acids have been substituted, deleted or added. Criteria for selecting amino acids from the donor are described in U.S. Pat. No. 5,585,089, e.g., columns 12-16 of U.S. Pat. No. 5,585,089, e.g., columns 12-16 of U.S. Pat. No. 5,585,089, the contents of which are hereby incorporated by reference. Other techniques for humanizing antibodies are described in Padlan et al. EP 519596 A1, published on Dec. 23, 1992.

[0822] The antibody molecule can be a single chain antibody. A single-chain antibody (scFv) may be engineered (see, for example, Colcher, D, et al. (1999) Ann N Y Acad Sci 880:263-80; and Reiter, Y. (1996) Clin Cancer Res 2:245-52). The single chain antibody can be dimerized or multimerized to generate multivalent antibodies having specificities for different epitopes of the same target protein.

[0823] In yet other embodiments, the antibody molecule has a heavy chain constant region chosen from, e.g. the heavy chain constant regions of IgG1, IgG2, IgG3, IgG4. IgM, IgA1, IgA2. IgD, and IgE; particularly, chosen from, e.g., the (e.g., human) heavy chain constant regions of IgG1, IgG2, IgG3, and IgG4. In another embodiment, the antibody molecule has a light chain constant region chosen from, e.g., the (e.g., human) light chain constant regions of kappa or lambda. The constant region can be altered, e.g., mutated, to modify the properties of the antibody (e.g., to increase or decrease one or more of: Fc receptor binding, antibody glycosylation, the number of cysteine residues, effector cell function, and/or complement function). In some embodiments the antibody has: effector function; and can fix complement. In other embodiments the antibody does not: recruit effector cells; or fix complement. In another embodiment, the antibody has reduced or no ability to bind an Fc receptor. For example, it is a isotype or subtype, fragment or other mutant, which does not support binding to an Fc receptor, e.g., it has a mutagenized or deleted Fc receptor binding region.

[0824] Methods for altering an antibody constant region are known in the art. Antibodies with altered function, e.g., altered affinity for an effector ligand, such as FcR on a cell, or the C1 component of complement can be produced by replacing at least one amino acid residue in the constant portion of the antibody with a different residue (see e.g., EP 388.151 A1, U.S. Pat. Nos. 5,624,821 and 5,648,260, the contents of all of which are hereby incorporated by reference). Similar type of alterations could be described which if applied to the murine, or other species immunoglobulin would reduce or eliminate these functions.

[0825] An antibody molecule can be derivatized or linked to another functional molecule (e.g., another peptide or protein). As used herein, a “derivatized” antibody molecule is one that has been modified. Methods of derivatization include but are not limited to the addition of a fluorescent moiety, a radionucleotide, a toxin, an enzyme or an affinity ligand such as biotin. Accordingly, the antibody molecules of the invention are intended to include derivatized and otherwise modified forms of the antibodies described herein, including immunoadhesion molecules. For example, an antibody molecule can be functionally linked (by chemical coupling, genetic fusion, noncovalent association or otherwise) to one or more other molecular entities, such as another antibody (e.g., a bispecific antibody or a diabody), a detectable agent, a cytotoxic agent, a pharmaceutical agent, and/or a protein or peptide that can mediate association of the antibody or antibody portion with another molecule (such as a streptavidin core region or a polyhistidine tag).

[0826] One type of derivatized antibody molecule is produced by crosslinking two or more antibodies (of the same type or of different types, e.g., to create bispecific antibodies). Suitable crosslinkers include those that are heterobifunctional, having two distinctly reactive groups separated by an appropriate spacer (e.g., m-maleimidobenzoyl-N-hydroxysuccinimide ester) or homobifunctional (e.g., disuccinimidyl suberate). Such linkers are available from Pierce Chemical Company, Rockford, Ill.

### CDR-Grafted Scaffolds

[0827] In some embodiments, the antibody molecule is a CDR-grafted scaffold domain. In some embodiments, the scaffold domain is based on a fibronectin domain, e.g., fibronectin type III domain. The overall fold of the fibronectin type III (Fn3) domain is closely related to that of the smallest functional antibody fragment, the variable domain of the antibody heavy chain. There are three loops at the end of Fn3; the positions of BC, DE and FG loops approximately correspond to those of CDR 1, 2 and 3 of the VH domain of an antibody. Fn3 does not have disulfide bonds; and therefore Fn3 is stable under reducing conditions, unlike antibodies and their fragments (see, e.g., WO 98/56915; WO 01/64942; WO 00/34784). An Fn3 domain can be modified (e.g., using CDRs or hypervariable loops described herein) or varied, e.g., to select domains that bind to an antigen/marker/cell described herein.

[0828] In some embodiments, a scaffold domain, e.g., a folded domain, is based on an antibody, e.g., a “minibody” scaffold created by deleting three beta strands from a heavy chain variable domain of a monoclonal antibody (see, e.g., Tramontano et al., 1994, J Mol. Recognit. 7:9; and Martin et al., 1994, EMBO J. 13:5303-5309). The “minibody” can be used to present two hypervariable loops. In some embodiments, the scaffold domain is a V-like domain (see, e.g., Coia et al. WO 99/45110) or a domain derived from tendamistatin, which is a 74 residue, six-strand beta sheet sandwich held together by two disulfide bonds (see, e.g., McConnell and Hoess. 1995, J Mol. Biol. 250:460). For example, the loops of tendamistatin can be modified (e.g., using CDRs or hypervariable loops) or varied, e.g., to select domains that bind to a marker/antigen/cell described herein. Another exemplary scaffold domain is a beta-sandwich structure derived from the extracellular domain of CTLA-4 (see, e.g., WO 00/60070).

[0829] Other exemplary scaffold domains include but are not limited to T-cell receptors: MHC proteins; extracellular domains (e.g., fibronectin Type Ill repeats, EGF repeats); protease inhibitors (e.g., Kunitz domains, ecotin, BPTI, and so forth): TPR repeats: trifoil structures: zinc finger domains: DNA-binding proteins: particularly monomeric DNA binding proteins: RNA binding proteins: enzymes, e.g., proteases (particularly inactivated proteases), RNase: chaperones, e.g., thioredoxin, and heat shock proteins; and intracellular signaling domains (such as SH2 and SH3 domains). See, e.g., US20040009530 and U.S. Pat. No. 7,501,121, incorporated herein by reference.

[0830] In some embodiments, a scaffold domain is evaluated and chosen, e.g., by one or more of the following criteria: (1) amino acid sequence. (2) sequences of several homologous domains. (3) 3-dimensional structure, and/or (4) stability data over a range of pH, temperature, salinity, organic solvent, oxidant concentration. In some embodiments, the scaffold domain is a small, stable protein domain, e.g., a protein of less than 100, 70, 50, 40 or 30 amino acids. The domain may include one or more disulfide bonds or may chelate a metal, e.g., zinc.

### Antibody-Based Fusions

[0831] A variety of formats can be generated which contain additional binding entities attached to the N or C terminus of antibodies. These fusions with single chain or disulfide stabilized Fvs or Fabs result in the generation of tetravalent molecules with bivalent binding specificity for each antigen. Combinations of scFvs and scFabs with IgGs enable the production of molecules which can recognize three or more different antigens.

### Antibody-Fab Fusion

[0832] Antibody-Fab fusions are bispecific antibodies comprising a traditional antibody to a first target and a Fab to a second target fused to the C terminus of the antibody heavy chain. Commonly the antibody and the Fab will have a common light chain. Antibody fusions can be produced by (1) engineering the DNA sequence of the target fusion, and (2) transfecting the target DNA into a suitable host cell to express the fusion protein. It seems like the antibody-scFv fusion may be linked by a (Gly)-Ser linker between the C-terminus of the CH3 domain and the N-terminus of the scFv, as described by Coloma. J, et al. (1997) Nature Biotech 15:159.

[0833] Antibody-scFv Fusion

[0834] Antibody-scFv Fusions are bispecific antibodies comprising a traditional antibody and a scFv of unique specificity fused to the C terminus of the antibody heavy chain. The scFv can be fused to the C terminus through the Heavy Chain of the scFv either directly or through a linker peptide. Antibody fusions can be produced by (1) engineering the DNA sequence of the target fusion, and (2) transfecting the target DNA into a suitable host cell to express the fusion protein. It seems like the antibody-scFv fusion may be linked by a (Gly)-Ser linker between the C-terminus of the CH3 domain and the N-terminus of the scFv, as described by Coloma, J, et al. (1997) Nature Biotech 15:159.

### Variable Domain Immunoglobulin DVD

[0835] A related format is the dual variable domain immunoglobulin (DVD), which are composed of VH and VL domains of a second specificity place upon the N termini of the V domains by shorter linker sequences.

[0836] Other exemplary multispecific antibody formats include, e.g., those described in the following US20160114057A1, US20130243775A1, US20140051833, US20130022601, US20150017187A1, US20120201746A1, US20150133638A1, US20130266568A1, US20160145340A1, WO2015127158A1, US20150203591A1, US20140322221A1, US20130303396A1, US20110293613, US20130017200A1, US20160102135A1, WO2015197598A2, WO2015197582A1, U.S. Pat. No. 9,359,437, US20150018529, WO2016115274A1, WO2016087416A1, US20080069820A1, U.S. Pat. No. 9,145,588B. U.S. Pat. No. 7,919,257, and US20150232560A1. Exemplary multispecific molecules utilizing a full antibody-Fab/scFab format include those described in the following, U.S. Pat. No. 9,382,323B2, US20140072581A1, US20140308285A1, US20130165638A1, US20130267686A1, US20140377269A1, U.S. Pat. No. 7,741,446B2, and WO1995009917A1. Exemplary multispecific molecules utilizing a domain exchange format include those described in the following, US20150315296A1, WO2016087650A1, US20160075785A1, WO2016016299A1, US20160130347A1, US20150166670. U.S. Pat. No. 8,703,132B2, US20100316645, U.S. Pat. No. 8,227,577B2, US20130078249.

### Fc-Containing Multispecific Molecules

[0837] In some embodiments, the multispecific molecules as described herein includes an immunoglobulin constant region (e.g., an Fc region). Exemplary Fc regions can be chosen from the heavy chain constant regions of IgG1, IgG2, IgG3 or IgG4; more particularly, the heavy chain constant region of human IgG1, IgG2, IgG3, or IgG4.

[0838] In some embodiments, the immunoglobulin chain constant region (e.g., the Fc region) is altered, e.g., mutated, to increase or decrease one or more of: Fc receptor binding, antibody glycosylation, the number of cysteine residues, effector cell function, or complement function.

[0839] In other embodiments, an interface of a first and second immunoglobulin chain constant regions (e.g., a first and a second Fc region) is altered, e.g., mutated, to increase or decrease dimerization, e.g., relative to a non-engineered interface, e.g., a naturally-occurring interface. For example, dimerization of the immunoglobulin chain constant region (e.g., the Fc region) can be enhanced by providing an Fc interface of a first and a second Fc region with one or more of: a paired protuberance-cavity (“knob-in-a hole”), an electrostatic interaction, or a strand-exchange, such that a greater ratio of heteromultimer to homomultimer forms, e.g., relative to a non-engineered interface.

[0840] In some embodiments, the multispecific molecules include a paired amino acid substitution at a position chosen from one or more of 347, 349, 350, 351, 366, 368, 370, 392, 394, 395, 397, 398, 399, 405, 407, or 409, e.g., of the Fc region of human IgG1 For example, the immunoglobulin chain constant region (e.g., Fc region) can include a paired an amino acid substitution chosen from: T366S. L368A, or Y407V (e.g., corresponding to a cavity or hole), and T366W (e.g., corresponding to a protuberance or knob).

[0841] In other embodiments, the multifunctional molecule includes a half-life extender, e.g., a human serum albumin or an antibody molecule to human serum albumin.

[0842] In some embodiments, Fc contains exemplary Fc modifications listed in Table 14.

### Heterodimerized Antibody Molecules & Methods of Making

[0843] Various methods of producing multispecific antibodies have been disclosed to address the problem of incorrect heavy chain pairing. Exemplary methods are described below. Exemplary multispecific antibody formats and methods of making said multispecific antibodies are also disclosed in e.g., Speiss et al. Molecular Immunology 67 (2015) 95-106; and Klein et al mAbs 4:6, 653-663; November/December 2012; the entire contents of each of which are incorporated by reference herein.

[0844] Heterodimerized bispecific antibodies are based on the natural IgG structure, wherein the two binding arms recognize different antigens. IgG derived formats that enable defined monovalent (and simultaneous) antigen binding are generated by forced heavy chain heterodimerization, combined with technologies that minimize light chain mispairing (e.g., common light chain) Forced heavy chain heterodimerization can be obtained using, e.g., knob-in-hole OR strand exchange engineered domains (SEED).

### Knob-in-Hole

[0845] Knob-in-Hole as described in U.S. Pat. Nos. 5,731,116, 7,476,724 and Ridgway, J, et al. (1996) Prot. Engineering 9(7): 617-621, broadly involves: (1) mutating the CH3 domain of one or both antibodies to promote heterodimerization; and (2) combining the mutated antibodies under conditions that promote heterodimerization. “Knobs” or “protuberances” are typically created by replacing a small amino acid in a parental antibody with a larger amino acid (e.g. T366Y or T366W): “Holes” or “cavities” are created by replacing a larger residue in a parental antibody with a smaller amino acid (e.g., Y407T. T366S, L368A and/or Y407V).

[0846] For bispecific antibodies including an Fc domain, introduction of specific mutations into the constant region of the heavy chains to promote the correct heterodimerization of the Fc portion can be utilized Several such techniques are reviewed in Klein et al. (mAbs (2012) 4:6, 1-11), the contents of which are incorporated herein by reference in their entirety. These techniques include the “knobs-into-holes” (KiH) approach which involves the introduction of a bulky residue into one of the CH3 domains of one of the antibody heavy chains. This bulky residue fits into a complementary “hole” in the other CH3 domain of the paired heavy chain so as to promote correct pairing of heavy chains (see e.g., U.S. Pat. No. 7,642,228).

[0847] Exemplary KiH mutations include S354C, T366W in the “knob” heavy chain and Y349C, T366S, L368A. Y407V in the “hole” heavy chain. Other exemplary KiH mutations are provided in Table 4, with additional optional stabilizing Fc cysteine mutations.

[0848] Other Fc mutations are provided by Igawa and Tsunoda who identified 3 negatively charged residues in the CH3 domain of one chain that pair with three positively charged residues in the CH3 domain of the other chain. These specific charged residue pairs are: E356-K439, E357-K370, D399-K409 and vice versa. By introducing at least two of the following three mutations in chain A: E356K, E357K and D399K, as well as K370E, K409D, K439E in chain B, alone or in combination with newly identified disulfide bridges, they were able to favor very efficient heterodimerization while suppressing homodimerization at the same time (Martens T et al. A novel one-armed antic-Met antibody inhibits glioblastoma growth in vivo. Clin Cancer Res 2006:12:6144-52; PMID: 17062691). Xencor defined 41 variant pairs based on combining structural calculations and sequence information that were subsequently screened for maximal beterodimerization, defining the combination of S364H, F405A (HA) on chain A and Y349T, T394F on chain B (TF) (Moore G L et al. A novel bispecific antibody format enables simultaneous bivalent and monovalent co-engagement of distinct target antigens. MAbs 2011; 3:546-57; PMID: 22123055).

[0849] Other exemplary Fc mutations to promote heterodimerization of multispecific antibodies include those described in the following references, the contents of each of which is incorporated by reference herein, WO2016071377A1, US20140079689A1, US20160194389A1, US20160257763, WO2016071376A2, WO2015107026A1, WO2015107025A1, WO2015107015A1, US20150353636A1, US20140199294A1, U.S. Pat. No. 7,750,128B2, US20160229915A1, US20150344570A1, U.S. Pat. No. 8,003,774A1, US20150337049A1, US20150175707A1, US20140242075A1, US20130195849A1, US20120149876A1, US20140200331A1, U.S. Pat. No. 9,309,311B2, U.S. Pat. No. 8,586,713, US20140037621A1, US20130178605A1, US20140363426A1, US20140051835A1 and US20110054151A1.

[0850] Stabilizing cysteine mutations have also been used in combination with KiH and other Fc heterodimerization promoting variants, see e.g., U.S. Pat. No. 7,183,076. Other exemplary cysteine modifications include, e.g., those disclosed in US20140348839A1, U.S. Pat. No. 7,855,275B2, and U.S. Pat. No. 9,000,130B2.

### Strand Exchange Engineered Domains (SEED)

[0851] Heterodimeric Fc platform that support the design of bispecific and asymmetric fusion proteins by devising strand-exchange engineered domain (SEED) C (H) 3 heterodimers are known. These derivatives of human IgG and IgA C (H) 3 domains create complementary human SEED C (H) 3 heterodimers that are composed of alternating segments of human IgA and IgG C(H)3 sequences. The resulting pair of SEED C(H)3 domains preferentially associates to form heterodimers when expressed in mammalian cells. SEEDbody (Sb) fusion proteins consist of [IgG1 hinge]-C(H)2-[SEED C(H)3], that may be genetically linked to one or more fusion partners (see e.g., Davis J H et al. SEEDbodies: fusion proteins based on strand exchange engineered domain (SEED) CH3 heterodimers in an Fc analogue platform for asymmetric binders or immunofusions and bispecific antibodies. Protein Eng Des Sel 2010; 23:195-202; PMID: 20299542 and U.S. Pat. No. 8,871,912. The contents of each of which are incorporated by reference herein).

### Fc-Containing Entities (Mini-Antibodies)

[0852] Fc-containing entities, also known as mini-antibodies, can be generated by fusing scFv to the C-termini of constant heavy region domain 3 (CH3-scFv) and/or to the hinge region (scFv-hinge-Fc) of an antibody with a different specificity. Trivalent entities can also be made which have disulfide stabilized variable domains (without peptide linker) fused to the C-terminus of CH3 domains of IgGs.

### Duobody

[0853] “Duobody” technology to produce bispecific antibodies with correct heavy chain pairing are known. The DuoBody technology involves three basic steps to generate stable bispecific human IgG1 antibodies in a post-production exchange reaction. In a first step, two IgG1s, each containing single matched mutations in the third constant (CH3) domain, are produced separately using standard mammalian recombinant cell lines. Subsequently, these IgG1 antibodies are purified according to standard processes for recovery and purification. After production and purification (post-production), the two antibodies are recombined under tailored laboratory conditions resulting in a bispecific antibody product with a very high yield (typically >95%) (see e.g., Labrijn et al, PNAS 2013; 110 (13): 5145-5150 and Labrijn et al. Nature Protocols 2014; 9 (10): 2450-63, the contents of each of which are incorporated by reference herein).

### Electrostatic Interactions

[0854] Methods of making multispecific antibodies using CH3 amino acid changes with charged amino acids such that homodimer formation is electrostatically unfavorable are disclosed. EP1870459 and WO 2009089004 describe other strategies for favoring heterodimer formation upon co-expression of different antibody domains in a host cell. In these methods, one or more residues that make up the heavy chain constant domain 3 (CH3), CH3-CH3 interfaces in both CH3 domains are replaced with a charged amino acid such that homodimer formation is electrostatically unfavorable and heterodimerization is electrostatically favorable. Additional methods of making multispecific molecules using electrostatic interactions are described in the following references, the contents of each of which is incorporated by reference herein, include US20100015133. U.S. Pat. No. 8,592,562B2, U.S. Pat. No. 9,200,060B2, US20140154254A1, and U.S. Pat. No. 9,358,286A1.

### Common Light Chain

[0855] Light chain mispairing needs to be avoided to generate homogenous preparations of bispecific IgGs. One way to achieve this is through the use of the common light chain principle, i.e. combining two binders that share one light chain but still have separate specificities. An exemplary method of enhancing the formation of a desired bispecific antibody from a mixture of monomers is by providing a common variable light chain to interact with each of the heteromeric variable heavy chain regions of the bispecific antibody. Compositions and methods of producing bispecific antibodies with a common light chain as disclosed in, e.g., U.S. Pat. No. 7,183,076B2, US20110177073A1, EP2847231A1, WO2016079081A1, and EP3055329A1, the contents of each of which is incorporated by reference herein.

### CrossMab

[0856] Another option to reduce light chain mispairing is the CrossMab technology which avoids non-specific L chain mispairing by exchanging CH1 and CL domains in the Fab of one half of the bispecific antibody. Such crossover variants retain binding specificity and affinity, but make the two arms so different that L chain mispairing is prevented. The CrossMab technology (as reviewed in Klein et al. Supra) involves domain swapping between heavy and light chains so as to promote the formation of the correct pairings. Briefly, to construct a bispecific IgG-like CrossMab antibody that could bind to two antigens by using two distinct light chain-heavy chain pairs, a two-step modification process is applied. First, a dimerization interface is engineered into the C-terminus of each heavy chain using a heterodimerization approach, e.g., Knob-into-hole (KiH) technology, to ensure that only a heterodimer of two distinct heavy chains from one antibody (e.g., Antibody A) and a second antibody (e.g., Antibody B) is efficiently formed. Next, the constant heavy 1 (CH1) and constant light (CL) domains of one antibody are exchanged (Antibody A), keeping the variable heavy (VH) and variable light (VL) domains consistent. The exchange of the CH1 and CL domains ensured that the modified antibody (Antibody A) light chain would only efficiently dimerize with the modified antibody (antibody A) heavy chain, while the unmodified antibody (Antibody B) light chain would only efficiently dimerize with the unmodified antibody (Antibody B) heavy chain; and thus only the desired bispecific CrossMab would be efficiently formed (see e.g., Cain, C. SciBX 4 (28); doi:10.1038/scibx.2011.783, the contents of which are incorporated by reference herein).

### Common Heavy Chain

[0857] An exemplary method of enhancing the formation of a desired bispecific antibody from a mixture of monomers is by providing a common variable heavy chain to interact with each of the heteromeric variable light chain regions of the bispecific antibody. Compositions and methods of producing bispecific antibodies with a common heavy chain are disclosed in, e.g., US20120184716, US20130317200, and US20160264685A1, the contents of each of which is incorporated by reference herein.

### Amino Acid Modifications

[0858] Alternative compositions and methods of producing multispecific antibodies with correct light chain pairing include various amino acid modifications. For example, Zymeworks describes heterodimers with one or more amino acid modifications in the CH1 and/or CL domains, one or more amino acid modifications in the VH and/or VL domains, or a combination thereof, which are part of the interface between the light chain and heavy chain and create preferential pairing between each heavy chain and a desired light chain such that when the two heavy chains and two light chains of the heterodimer pair are co-expressed in a cell, the heavy chain of the first heterodimer preferentially pairs with one of the light chains rather than the other (see e.g., WO2015181805). Other exemplary methods are described in WO2016026943 (Argen-X), US20150211001. US20140072581A1, US20160039947A1, and US20150368352.

### Lambda Kappa Formats

[0859] Multispecific molecules (e.g., multispecific antibody molecules) that include the lambda light chain polypeptide and a kappa light chain polypeptides, can be used to allow for heterodimerization. Methods for generating bispecific antibody molecules comprising the lambda light chain polypeptide and a kappa light chain polypeptides are disclosed in PCT/US17/53053 filed on Sep. 22, 2017, and designated publication number WO 2018/057955, incorporated herein by reference in its entirety.

[0860] In some embodiments, the multispecific molecule includes a multispecific antibody molecule, e.g., an antibody molecule comprising two binding specificities, e.g., a bispecific antibody molecule. The multispecific antibody molecule includes:
[0861] a lambda light chain polypeptide 1 (LLCP1) specific for a first epitope;
[0862] a heavy chain polypeptide 1 (HCP1) specific for the first epitope;
[0863] a kappa light chain polypeptide 2 (KLCP2) specific for a second epitope; and
[0864] a heavy chain polypeptide 2 (HCP2) specific for the second epitope.

[0865] “Lambda light chain polypeptide 1 (LLCP1)”, as that term is used herein, refers to a polypeptide comprising sufficient light chain (LC) sequence, such that when combined with a cognate heavy chain variable region, can mediate specific binding to its epitope and complex with an HCP1. In some embodiments, it comprises all or a fragment of a CH1 region. In some embodiments, an LLCP1 comprises LC-CDR1, LC-CDR2, LC-CDR3, FR1, FR2, FR3, FR4, and CH1, or sufficient sequence therefrom to mediate specific binding of its epitope and complex with an HCP1, LLCP1, together with its HCP1, provide specificity for a first epitope (while KLCP2, together with its HCP2, provide specificity for a second epitope). As described elsewhere herein, LLCP1 has a higher affinity for HCP 1 than for HCP2.

[0866] “Kappa light chain polypeptide 2 (KLCP2)”, as that term is used herein, refers to a polypeptide comprising sufficient light chain (LC) sequence, such that when combined with a cognate heavy chain variable region, can mediate specific binding to its epitope and complex with an HCP2. In some embodiments, it comprises all or a fragment of a CH1 region. In some embodiments, a KLCP2 comprises LC-CDR1, LC-CDR2, LC-CDR3, FR1, FR2, FR3, FR4, and CH1, or sufficient sequence therefrom to mediate specific binding of its epitope and complex with an HCP2. KLCP2, together with its HCP2, provide specificity for a second epitope (while LLCP1, together with its HCP1, provide specificity for a first epitope).

[0867] “Heavy chain polypeptide 1 (HCP1)”, as that term is used herein, refers to a polypeptide comprising sufficient heavy chain (HC) sequence, e.g., HC variable region sequence, such that when combined with a cognate LLCP1, can mediate specific binding to its epitope and complex with an HCP1. In some embodiments, it comprises all or a fragment of a CH1 region. In some embodiments, it comprises all or a fragment of a CH2 and/or CH3 region. In some embodiments, an HCP1 comprises HC-CDR1, HC-CDR2, HC-CDR3, FR1, FR2, FR3, FR4, CH1, CH2, and CH3, or sufficient sequence therefrom to: (i) mediate specific binding of its epitope and complex with an LLCP1, (ii) to complex preferentially, as described herein to LLCP1 as opposed to KLCP2; and (iii) to complex preferentially, as described herein, to an HCP2, as opposed to another molecule of HCP1, HCP1, together with its LLCP1, provide specificity for a first epitope (while KLCP2, together with its HCP2, provide specificity for a second epitope).

[0868] “Heavy chain polypeptide 2 (HCP2)”, as that term is used herein, refers to a polypeptide comprising sufficient heavy chain (HC) sequence, e.g., HC variable region sequence, such that when combined with a cognate LLCP1, can mediate specific binding to its epitope and complex with an HCP1. In some embodiments, it comprises all or a fragment of a CH1 region. In some embodiments, it comprises all or a fragment of a CH2 and/or CH3 region. In some embodiments, an HCP1 comprises HC-CDR1, HC-CDR2, HC-CDR3, FR1, FR2, FR3, FR4, CH1, CH2, and CH3, or sufficient sequence therefrom to: (i) mediate specific binding of its epitope and complex with an KLCP2. (ii) to complex preferentially, as described herein to KLCP2 as opposed to LLCP1; and (iii) to complex preferentially, as described herein, to an HCP1, as opposed to another molecule of HCP2. HCP2, together with its KLCP2, provide specificity for a second epitope (while LLCP1, together with its HCP1, provide specificity for a first epitope).

[0869] In some embodiments, in the multifunctional polypeptide molecule as described herein:
[0870] LLCP1 has a higher affinity for HCP1 than for HCP2; and/or
[0871] KLCP2 has a higher affinity for HCP2 than for HCP1.

[0872] In some embodiments, the affinity of LLCP1 for HCP1 is sufficiently greater than its affinity for HCP2, such that under preselected conditions, e.g., in aqueous buffer, e.g., at pH 7, in saline, e.g., at pH 7, or under physiological conditions, at least 75, 80, 90, 95, 98, 99, 99.5, or 99.9% of the multispecific antibody molecule molecules have a LLCP1 complexed, or interfaced with, a HCP1.

[0873] In some embodiments, in the multifunctional polypeptide molecule as described herein:
[0874] the HCP1 has a greater affinity for HCP2, than for a second molecule of HCP1; and/or
[0875] the HCP2 has a greater affinity for HCP1, than for a second molecule of HCP2.

[0876] In some embodiments, the affinity of HCP1 for HCP2 is sufficiently greater than its affinity for a second molecule of HCP1, such that under preselected conditions, e.g., in aqueous buffer, e.g., at pH 7, in saline, e.g., at pH 7, or under physiological conditions, at least 75%, 80, 90, 95, 98, 99 99.5 or 99.9% of the multispecific antibody molecule molecules have a HCP1 complexed, or interfaced with, a HCP2.

[0877] In another aspect, described herein is a method for making, or producing, a multispecific antibody molecule. The method includes:
[0878] (i) providing a first heavy chain polypeptide (e.g., a heavy chain polypeptide comprising one, two, three or all of a first heavy chain variable region (first VH), a first CH1, a first heavy chain constant region (e.g., a first CH2, a first CH3, or both));
[0879] (ii) providing a second heavy chain polypeptide (e.g., a heavy chain polypeptide comprising one, two, three or all of a second heavy chain variable region (second VH), a second CH1, a second heavy chain constant region (e.g., a second CH2, a second CH3, or both));
[0880] (iii) providing a lambda chain polypeptide (e.g., a lambda light variable region (VLλ), a lambda light constant chain (VLλ), or both) that preferentially associates with the first heavy chain polypeptide (e.g., the first VH); and
[0881] (iv) providing a kappa chain polypeptide (e.g., a lambda light variable region (VLλ), a lambda light constant chain (VLλ), or both) that preferentially associates with the second heavy chain polypeptide (e.g., the second VH), under conditions where (i)-(iv) associate.

[0882] In some embodiments, the first and second heavy chain polypeptides form an Fc interface that enhances heterodimerization.

[0883] In some embodiments. (i)-(iv) (e.g., nucleic acid encoding (i)-(iv)) are introduced in a single cell, e.g., a single mammalian cell, e.g., a CHO cell. In some embodiments, (i)-(iv) are expressed in the cell. In some embodiments, (i)-(iv) (e.g., nucleic acid encoding (i)-(iv)) are introduced in different cells, e.g., different mammalian cells, e.g., two or more CHO cell. In some embodiments, (i)-(iv) are expressed in the cells.

[0884] In some embodiments, the method further comprises purifying a cell-expressed antibody molecule, e.g., using a lambda- and/or kappa-specific purification, e.g., affinity chromatography.

[0885] In some embodiments, the method further comprises evaluating the cell-expressed multispecific antibody molecule. For example, the purified cell-expressed multispecific antibody molecule can be analyzed by techniques known in the art, include mass spectrometry. In some embodiments, the purified cell-expressed antibody molecule is cleaved, e.g., digested with papain to yield the Fab moieties and evaluated using mass spectrometry.

[0886] In some embodiments, the method produces correctly paired kappa/lambda multispecific, e.g., bispecific, antibody molecules in a high yield, e.g., at least 75%, 80, 90, 95, 98, 99 99.5 or 99.9%.

[0887] In other embodiments, the multispecific, e.g., a bispecific, antibody molecule that includes: (i) a first heavy chain polypeptide (HCP1) (e.g., a heavy chain polypeptide comprising one, two, three or all of a first heavy chain variable region (first VH), a first CH1, a first heavy chain constant region (e.g., a first CH2, a first CH3, or both)), e.g., wherein the HCP1 binds to a first epitope:
[0888] (ii) a second heavy chain polypeptide (HCP2) (e.g., a heavy chain polypeptide comprising one, two, three or all of a second heavy chain variable region (second VH), a second CH1, a second heavy chain constant region (e.g., a second CH2, a second CH3, or both)), e.g., wherein the HCP2 binds to a second epitope;
[0889] (iii) a lambda light chain polypeptide (LLCP1) (e.g., a lambda light variable region (VLλ), a lambda light constant chain (VLλ), or both) that preferentially associates with the first heavy chain polypeptide (e.g., the first VH), e.g., wherein the LLCP1 binds to a first epitope; and
[0890] (iv) a kappa light chain polypeptide (KLCP2) (e.g., a kappa light variable region (VLκ), a kappa light constant chain (VLκ), or both) that preferentially associates with the second heavy chain polypeptide (e.g., the second VH), e.g., wherein the KLCP2 binds to a second epitope.

[0891] In some embodiments, the first and second heavy chain polypeptides form an Fc interface that enhances heterodimerization. In some embodiments, the multispecific antibody molecule has a first binding specificity that includes a hybrid VLλ-CLλ heterodimerized to a first heavy chain variable region connected to the Fc constant, CH2-CH3 domain (having a knob modification) and a second binding specificity that includes a hybrid VLκ-CLκ heterodimerized to a second heavy chain variable region connected to the Fc constant. CH2-CH3 domain (having a bole modification).

### Multispecific or Multifunctional Antibody Molecules

[0892] Exemplary structures of multispecific and multifunctional molecules defined herein are described throughout. Exemplary structures are further described in: Weidle U et al. (2013) The Intriguing Options of Multispecific Antibody Formats for Treatment of Cancer. Cancer Genomics & Proteomics 10:1-18 (2013); and Spiess C et al. (2015) Alternative molecular formats and therapeutic applications for bispecific antibodies. Molecular Immmology 67:95-106; the full contents of each of which is incorporated by reference herein).

[0893] In some embodiments, multispecific antibody molecules can comprise more than one antigen-binding site, where different sites are specific for different antigens. In some embodiments, multispecific antibody molecules can bind more than one (e.g., two or more) epitopes on the same antigen. In some embodiments, multispecific antibody molecules comprise an antigen-binding site specific for a target cell (e.g., cancer cell) and a different antigen-binding site specific for an immune effector cell. In some embodiments, the multispecific antibody molecule is a bispecific antibody molecule. Bispecific antibody molecules can be classified into five different structural groups: (i) bispecific immunoglobulin G (BsIgG); (ii) IgG appended with an additional antigen-binding moiety; (iii) bispecific antibody fragments; (iv) bispecific fusion proteins; and (v) bispecific antibody conjugates.

[0894] BsIgG is a format that is monovalent for each antigen. Exemplary BsIgG formats include but are not limited to crossMab, DAF (two-in-one), DAF (four-in-one), DutaMab, DT-IgG, knobs-in-holes common LC, knobs-in-holes assembly, charge pair, Fab-arm exchange, SEEDbody, triomab, LUZ-Y, Fcab, κλ-body, orthogonal Fab. See Spiess et al. Mol. Immunol. 67 (2015). 95-106. Exemplary BsIgGs include catumaxomab (Fresenius Biotech. Trion Pharma, Neopharm), which contains an anti-CD3 arm and an anti-EpCAM arm; and ertumaxomab (Neovii Biotech, Fresenius Biotech), which targets CD3 and HER2. In some embodiments, BsIgG comprises heavy chains that are engineered for heterodimerization. For example, heavy chains can be engineered for heterodimerization using a “knobs-into-holes” strategy, a SEED platform, a common heavy chain (e.g., in κλ-bodies), and use of heterodimeric Fc regions. See Spiess et al. Mol. Immunol. 67 (2015): 95-106. Strategies that have been used to avoid heavy chain pairing of homodimers in BsIgG include knobs-in-boles, duobody, asymmetric, charge pair, HA-TF. SEEDbody, and differential protein A affinity. See Id. BsIgG can be produced by separate expression of the component antibodies in different host cells and subsequent purification/assembly into a BsIgG. BsIgG can also be produced by expression of the component antibodies in a single host cell. BsIgG can be purified using affinity chromatography, e.g., using protein A and sequential pH elution.

[0895] IgG appended with an additional antigen-binding moiety is another format of bispecific antibody molecules. For example, monospecific IgG can be engineered to have bispecificity by appending an additional antigen-binding unit onto the monospecific IgG, e.g., at the N- or C-terminus of either the heavy or light chain. Exemplary additional antigen-binding units include single domain antibodies (e.g., variable heavy chain or variable light chain), engineered protein scaffolds, and paired antibody variable domains (e.g., single chain variable fragments or variable fragments). See Id. Examples of appended IgG formats include dual variable domain IgG (DVD-Ig), IgG(H)-scFv, scFv-(H) IgG, IgG(L)-scFv, scFv-(L) IgG, IgG(L,H)-Fv, IgG(H)-V, V(H)-IgG, IgG(L)-V, V(L)-IgG, KIH IgG-scFab, 2scFv-IgG, IgG-2scFv, scFv4-Ig, zybody, and DVI-IgG (four-in-one). See Spiess et al. Mol. Immunol. 67 (2015): 95-106. An example of an IgG-scFv is MM-141 (Merrimack Pharmaceuticals), which binds IGF-1R and HER3. Examples of DVD-Ig include ABT-981 (AbbVie), which binds IL-1α and IL-1β; and ABT-122 (AbbVie), which binds TNF and IL-17A.

[0896] Bispecific antibody fragments (BsAb) are a format of bispecific antibody molecules that lack some or all of the antibody constant domains. For example, some BsAb lack an Fc region. In some embodiments, bispecific antibody fragments include heavy and light chain regions that are connected by a peptide linker that permits efficient expression of the BsAb in a single host cell. Exemplary bispecific antibody fragments include but are not limited to nanobody, nanobody-HAS. BITE, Diabody. DART, TandAb, scDiabody, scDiabody-CH3, Diabody-CH3, triple body, miniantibody, minibody, TriBi minibody, scFv-CH3 KIH, Fab-scFv, scFv-CH-CL-scFv, F(ab′)2, F(ab′)2-scFv2, scFv-KIH, Fab-scFv-Fc, tetravalent HCAb, scDiabody-Fc, Diabody-Fc, tandem scFv-Fc, and intrabody. See Id. For example, the BiTE format comprises tandem scFvs, where the component scFvs bind to CD3 on T cells and a surface antigen on cancer cells.

[0897] Bispecific fusion proteins include antibody fragments linked to other proteins, e.g., to add additional specificity and/or functionality. An example of a bispecific fusion protein is an immTAC, which comprises an anti-CD3 scFv linked to an affinity-matured T-cell receptor that recognizes HLA-presented peptides. In some embodiments, the dock-and-lock (DNL) method can be used to generate bispecific antibody molecules with higher valency. Also, fusions to albumin binding proteins or human serum albumin can be extend the serum half-life of antibody fragments. See Id.

[0898] In some embodiments, chemical conjugation, e.g., chemical conjugation of antibodies and/or antibody fragments, can be used to create BsAb molecules. See Id. An exemplary bispecific antibody conjugate includes the CovX-body format, in which a low molecular weight drug is conjugated site-specifically to a single reactive lysine in each Fab arm or an antibody or fragment thereof. In some embodiments, the conjugation improves the serum half-life of the low molecular weight drug. An exemplary CovX-body is CVX-241 (NCT01004822), which comprises an antibody conjugated to two short peptides inhibiting either VEGF or Ang2. See Id.

[0899] The antibody molecules can be produced by recombinant expression, e.g., of at least one or more component, in a host system. Exemplary host systems include eukaryotic cells (e.g., mammalian cells, e.g., CHO cells, or insect cells, e.g., SF9 or S2 cells) and prokaryotic cells (e.g., E. coli). Bispecific antibody molecules can be produced by separate expression of the components in different host cells and subsequent purification/assembly. Alternatively, the antibody molecules can be produced by expression of the components in a single host cell. Purification of bispecific antibody molecules can be performed by various methods such as affinity chromatography, e.g., using protein A and sequential pH elution. In other embodiments, affinity tags can be used for purification, e.g., histidine-containing tag, myc tag, or streptavidin tag.

### Exemplary Bispecific Molecules

[0900] In an aspect, a multispecific molecule as described herein comprises a sequence as described herein. e.g., a sequence chosen from SEQ ID NOs: 1004-1007, 3275-3277, 3286, or 3287, or a sequence with at least 85%, 90%, 95%, 96%, 97%, 98%, 99% or more identity thereto. In some embodiments, a multispecific molecule as described herein comprises a leader sequence comprising the amino acid sequence of SEQ ID NO: 3288. In some embodiments, a multispecific molecule as described herein does not comprise a leader sequence comprising the amino acid sequence of SEQ ID NO: 3288.

[0901] Molecule F: aCD19×aVb6.5: Molecule F comprises a heavy chain comprising the amino acid sequence of SEQ ID NO: 1004 and a light chain comprising the amino acid sequence of SEQ ID NO: 1005

Molecule F.1
(heavy chain) (Torvbeta6_5 scFv/anti-CD19 heavy chain)
SEQ ID NO: 1004
METDTLLLWVLLLWVPGSTGQVQLVQSGAEVKKPGSSVKVSCKASGYSFTTYYIHWVRQAPGQGL
EWMGWFFPGSGNIKYNEKFKGRVTITADTSTSTAYMELSSLRSEDTAVYYCAGSYYSYDVLDYWG
QGTTVTVSSGGGGSGGGGSGGGGSGGGGSDIQMTQSPSFLSASVGDRVTITCKASQNVGINVVWHQ
QKPGKAPKALIYSSSHRYSGVPSRFSGSGSGTEFTLTISSLQPEDFATYFCQQFKSYPLTFGQGTKLEIK
GGGGSQVTLRESGPALVKPTQTLTLTCTFSGFSLSTSGMGVGWIRQPPGKALEWLAHIWWDDDKRY
NPALKSRLTISKDTSKNQVFLTMTNMDPVDTATYYCARMELWSYYFDYWGQGTTVTVSSASTKGP
SVFPLAPSSKSTSGGTAALGCLVKDYFPEPVTVSWNSGALTSGVHTFPAVLQSSGLYSLSSVVTVPSS
SLGTQTYICNVNHKPSNTKVDKKVEPKSCDKTHTCPPCPAPELLGGPSVFLFPPKPKDTLMISRTPEVT
CVVVDVSHEDPEVKFNWYVDGVEVHNAKTKPREEQYASTYRVVSVLTVLHQDWLNGKEYKCKVS
NKALPAPIEKTISKAKGQPREPQVYTLPPSREEMTKNQVSLTCLVKGFYPSDIAVEWESNGQPENNYK
TTPPVLDSDGSFFLYSKLTVDKSRWQQGNVFSCSVMHEALHNHYTQKSLSLSPGK
Molecule F.2
(light chain) (anti-CD19 light chain)
SEQ ID NO: 1005
METPAQLLFLLLLWLPDTTGENVLTQSPATLSLSPGERATLSCSASSSVSYMHWYQQKPGQAPRLLI
YDTSKLASGIPARFSGSGSGTDHTLTISSLEPEDFAVYYCFQGSVYPFTFGQGTKLEIKRTVAAPSVFIF
PPSDEQLKSGTASVVCLLNNFYPREAKVQWKVDNALQSGNSQESVTEQDSKDSTYSLSSTLTLSKAD
YEKHKVYACEVTHQGLSSPVTKSFNRGEC

[0902] In an aspect, a multispecific molecule as described herein comprises SEQ ID NO: 1004 and/or SEQ ID NO: 1005 or a sequence with at least 85%, 90%, 95%, 96%, 97%, 98%, 99% or more identity thereto.

[0903] Molecule G: aBCMA×aVb6.5: Molecule G comprises a heavy chain comprising the amino acid sequence of SEQ ID NO: 1006 and a light chain comprising the amino acid sequence of SEQ ID NO: 1007.

Molecule G.1
(heavy chain)
SEQ ID NO: 1006
METDTLLLWVLLLWVPGSTGQVQLVQSGAEVKKPGSSVKVSCKASGYSFTTYYIHWVRQAPGQGL
EWMGWFFPGSGNIKYNEKFKGRVTITADTSTSTAYMELSSLRSEDTAVYYCAGSYYSYDVLDYWG
QGTTVTVSSGGGGSGGGGSGGGGSGGGGSDIQMTQSPSFLSASVGDRVTITCKASQNVGINVVWHQ
QKPGKAPKALIYSSSHRYSGVPSRFSGSGSGTEFTLTISSLQPEDFATYFCQQFKSYPLTFGQGTKLEIK
GGGGSQVQLVESGGGVVQPGRSLRLSCAASGIDFSRYWMSWVRQAPGKGLEWVGEINPDSSTINYA
PSLKDRFTISRDNSKNTLYLQMSSLRAEDTAVYYCASLYYDYGDAMDYWGQGTTVTVSSASTKGPS
VFPLAPSSKSTSGGTAALGCLVKDYFPEPVTVSWNSGALTSGVHTFPAVLQSSGLYSLSSVVTVPSSS
LGTQTYICNVNHKPSNTKVDKKVEPKSCDKTHTCPPCPAPELLGGPSVFLFPPKPKDTLMISRTPEVT
CVVVDVSHEDPEVKFNWYVDGVEVHNAKTKPREEQYASTYRVVSVLTVLHQDWLNGKEYKCKVS
NKALPAPIEKTISKAKGQPREPQVYTLPPSREEMTKNQVSLTCLVKGFYPSDIAVEWESNGQPENNYK
TTPPVLDSDGSFFLYSKLTVDKSRWQQGNVFSCSVMHEALHNRFTQKSLSLSPGK
Molecule G.2
(light chain)
SEQ ID NO: 1007
METDTLLLWVLLLWVPGSTGDIQMTQSPSSLSASVGDRVTITCKASQSVDSNVAWYQQKPEKAPKA
LIFSASLRFSGVPSRFSGSGSGTDFTLTISSLQPEDFATYFCQQYNNYPLTFGQGTKLEIKRTVAAPSVFI
FPPSDEQLKSGTASVVCLLNNFYPREAKVQWKVDNALQSGNSQESVTEQDSKDSTYSLSSTLTLSKA
DYEKHKVYACEVTHQGLSSPVTKSFNRGEC

[0904] In an aspect, a multispecific molecule as described herein comprises SEQ ID NO: 1006 and/or SEQ ID NO: 1007 or a sequence with at least 85%, 90%, 95%, 96%, 97%, 98%, 99% or more identity thereto.

[0905] Molecule H: aBCMA×aTCRvbeta6_5: Molecule H comprises a first heavy chain comprising the amino acid sequence of SEQ ID NO: 3275, a light chain comprising the amino acid sequence of SEQ ID NO: 3277, and a second heavy chain comprising the amino acid sequence of SEQ ID NO: 3276.

Molecule H.1
(anti-BCMA heavy chain)
SEQ ID NO: 3275
METDTLLLWVLLLWVPGSTGQVQLVESGGGVVQPGRSLRLSCAASGIDFSRYWMSWVRQAPGKGL
EWVGEINPDSSTINYAPSLKDRFTISRDNSKNTLYLQMSSLRAEDTAVYYCASLYYDYGDAMDYWG
QGTTVTVSSASTKGPSVFPLAPSSKSTSGGTAALGCLVKDYFPEPVTVSWNSGALTSGVHTFPAVLQS
SGLYSLSSVVTVPSSSLGTQTYICNVNHKPSNTKVDKRVEPKSCDKTHTCPPCPAPELLGGPSVFLFPP
KPKDTLMISRTPEVTCVVVDVSHEDPEVKFNWYVDGVEVHNAKTKPREEQYNATYRVVSVLTVLH
QDWLNGKEYKCKVSNKALPAPIEKTISKAKGQPREPQVYTLPPCREEMTKNQVSLWCLVKGFYPSDI
AVEWESNGQPENNYKTTPPVLDSDGSFFLYSKLTVDKSRWQQGNVFSCSVMHEALHNHYTQKSLSL
SPGK
Molecule H.2
(TCRvbeta_6_5 scFv humanized)
SEQ ID NO: 3276
METDTLLLWVLLLWVPGSTGQVQLVQSGAEVKKPGSSVKVSCKASGYSFTTYYIHWVRQAPGQGL
EWMGWFFPGSGNIKYNEKFKGRVTITADTSTSTAYMELSSLRSEDTAVYYCAGSYYSYDVLDYWG
QGTTVTVSSGGGGSGGGGSGGGGSGGGGSDIQMTQSPSFLSASVGDRVTITCKASQNVGINVVWHQ
QKPGKAPKALIYSSSHRYSGVPSRFSGSGSGTEFTLTISSLQPEDFATYFCQQFKSYPLTFGQGTKLEIK
GGGGSGGGGSDKTHTCPPCPAPELLGGPSVFLFPPKPKDTLMISRTPEVTCVVVDVSHEDPEVKFNW
YVDGVEVHNAKTKPREEQYASTYRVVSVLTVLHQDWLNGKEYKCKVSNKALPAPIEKTISKAKGQP
REPQVCTLPPSREEMTKNQVSLSCAVKGFYPSDIAVEWESNGQPENNYKTTPPVLDSDGSFFLVSKLT
VDKSRWQQGNVFSCSVMHEALHNHYTQKSLSLSPGK
Molecule H.3
(anti-BCMA light chain)
SEQ ID NO: 3277
METDTLLLWVLLLWVPGSTGDIQMTQSPSSLSASVGDRVTITCKASQSVDSNVAWYQQKPEKAPKA
LIFSASLRFSGVPSRFSGSGSGTDFTLTISSLQPEDFATYFCQQYNNYPLTFGQGTKLEIKRTVAAPSVFI
FPPSDEQLKSGTASVVCLLNNFYPREAKVQWKVDNALQSGNSQESVTEQDSKDSTYSLSSTLTLSKA
DYEKHKVYACEVTHQGLSSPVTKSFNRGEC

[0906] In an aspect, a multispecific molecule as described herein comprises SEQ ID NO: 3275, SEQ ID NO: 3276, and/or SEQ ID NO: 3277 or a sequence with at least 85%, 90%, 95%, 96%, 97%, 98%, 99% or more identity thereto.

[0907] Molecule I: half arm BCMA Fab with c-terminal scFv TCRvbeta: Molecule I comprises a first heavy chain comprising the amino acid sequence of SEQ ID NO: 3286, a light chain comprising the amino acid sequence of SEQ ID NO: 3277, and a second heavy chain comprising the amino acid sequence of SEQ ID NO: 3287.

Molecule I.1
(heavy chain 1)
SEQ ID NO: 3286
METDTLLLWVLLLWVPGSTGQVQLVESGGGVVQPGRSLRLSCAASGIDFSRYWMSWVRQAPGKGL
EWVGEINPDSSTINYAPSLKDRFTISRDNSKNTLYLQMSSLRAEDTAVYYCASLYYDYGDAMDYWG
QGTTVTVSSASTKGPSVFPLAPSSKSTSGGTAALGCLVKDYFPEPVTVSWNSGALTSGVHTFPAVLQS
SGLYSLSSVVTVPSSSLGTQTYICNVNHKPSNTKVDKRVEPKSCDKTHTCPPCPAPELLGGPSVFLFPP
KPKDTLMISRTPEVTCVVVDVSHEDPEVKFNWYVDGVEVHNAKTKPREEQYNSTYRVVSVLTVLH
QDWLNGKEYKCKVSNKALPAPIEKTISKAKGQPREPQVYTLPPCREEMTKNQVSLWCLVKGFYPSDI
AVEWESNGQPENNYKTTPPVLDSDGSFFLYSKLTVDKSRWQQGNVFSCSVMHEALHNHYTQKSLSL
SPGKGGGGSGGGGSGGGGSEVQLVESGGGLVQPGGSLRLSCAASGFTFSTYAMNWVRQAPGKGLE
WVSRIRSKYNNYATYYADSVKDRFTISRDDSKNTLYLQMNSLKTEDTAVYYCVRHGNFGNSYVSW
FAYWGQGTLVTVSSGGGGSGGGGSGGGGSGGGGSQAVVTQEPSLTVSPGGTVTLTCRSSTGAVTTS
NYANWVQQKPGQAPRGLIGGTNKRAPWTPARFSGSLLGGKAALTLSGAQPEDEAEYYCALWYSNL
WVFGGGTKLTVL
Molecule I.2
(light chain)
SEQ ID NO: 3277
METDTLLLWVLLLWVPGSTGDIQMTQSPSSLSASVGDRVTITCKASQSVDSNVAWYQQKPEKAPKA
LIFSASLRFSGVPSRFSGSGSGTDFTLTISSLQPEDFATYFCQQYNNYPLTFGQGTKLEIKRTVAAPSVFI
FPPSDEQLKSGTASVVCLLNNFYPREAKVQWKVDNALQSGNSQESVTEQDSKDSTYSLSSTLTLSKA
DYEKHKVYACEVTHQGLSSPVTKSFNRGEC
Molecule I.3
(heavy chain 2)
SEQ ID NO: 3287
METDTLLLWVLLLWVPGSTGDKTHTCPPCPAPELLGGPSVFLFPPKPKDTLMISRTPEVTCVVVDVS
HEDPEVKFNWYVDGVEVHNAKTKPREEQYNSTYRVVSVLTVLHQDWLNGKEYKCKVSNKALPAPI
EKTISKAKGQPREPQVCTLPPSREEMTKNQVSLSCAVKGFYPSDIAVEWESNGQPENNYKTTPPVLDS
DGSFFLVSKLTVDKSRWQQGNVFSCSVMHEALHNHYTQKSLSLSPGK

[0908] In an aspect, a multispecific molecule as described herein comprises SEQ ID NO: 3286, SEQ ID NO: 3277, and/or SEQ ID NO: 3287 or a sequence with at least 85%, 90%, 95%, 96%, 97%, 98%, 99% or more identity thereto.

[0909] In some embodiments, the multispecific or multifunctional molecule as described herein binds to immune cells. In some embodiments, the multispecific or multifunctional molecule as described herein binds to subsets of immune cells. In some embodiments, the multispecific or multifunctional molecule as described herein binds to T cells. In some embodiments, the multispecific or multifunctional molecule as described herein binds to gamma/delta T cells. In some embodiments, the multispecific or multifunctional molecule as described herein binds to NKT cells. In some embodiments, the multispecific or multifunctional molecule as described herein binds to T cells via a binding moiety. Exemplary binding moieties include, but are not limited to, the binding moieties that bind to TRBC1, TRBC2, CD3, TRAC, TRAV subtypes. CD4. CD8, CD2, CD28, 41BB, PD1, CTLA4, OX40, TIM3, or LAG3. In some embodiments, the multispecific or multifunctional molecule as described herein binds to T cells via a binding moiety that binds to TRBC1. In some embodiments, the multispecific or multifunctional molecule as described herein binds to T cells via a binding moiety that binds to TRBC2. In some embodiments, the multispecific or multifunctional molecule as described herein comprises a binding moiety that binds to TRBC1. In some embodiments, the multispecific or multifunctional molecule as described herein comprises a binding moiety that binds to TRBC2.

[0910] In some embodiments, in exemplary embodiments of multifunctional molecules comprises a tumor-associated antigen (TAA)-binding moiety, a TCRβV-binding moiety, and at least one cytokine polypeptide as described herein, a tumor-associated antigen (TAA)-binding moiety and/or a TCRβV-binding moiety are antibody, an antigen binding fragment thereof or an antibody fragment. In some embodiments, in exemplary embodiments of multifunctional molecules comprises a tumor-associated antigen (TAA)-binding moiety, a TCRβV-binding moiety, and at least one cytokine polypeptide as described herein, an antigen binding fragment or an antibody fragment comprises Fab, Fab′. F(ab′)₂, F(ab)₂, variable fragment (Fv), domain antibody (dAb), or single chain variable fragment (scFv). In some embodiments, in exemplary embodiments of multifunctional molecules comprises a tumor-associated antigen (TAA)-binding moiety, a TCRβV-binding moiety, and at least one cytokine polypeptide as described herein, the at least one cytokine polypeptide is selected from the group consisting of interleukin-2 (IL-2) or a fragment or a functional fragment or a functional variant thereof, interleukin-7 (IL-7) or a fragment or a functional fragment or a functional variant thereof, interleukin-12 (IL-12) or a fragment or a functional fragment or a functional variant thereof, interleukin-15 (IL-15) or a fragment or a functional fragment or a functional variant thereof, interleukin-18 (IL-18) or a fragment or a functional fragment or a functional variant thereof, interleukin-21 (IL-21) or a fragment or a functional fragment or a functional variant thereof, or interferon gamma or a fragment or a functional fragment or a functional variant thereof, or a combination thereof. In some embodiments, exemplary embodiments of multifunctional molecules comprises a tumor-associated antigen (TAA)-binding moiety, a TCRβV-binding moiety, and at least one cytokine polypeptide as described herein comprises an exemplary dimerization module comprising an Fc region comprising N297A mutation. In some embodiments, exemplary embodiments of multifunctional molecules comprising a tumor-associated antigen (TAA)-binding moiety, a TCRβV-binding moiety, and at least one cytokine polypeptide as described herein comprise an exemplary dimerization module, e.g., an Fc region comprising Knob-in-bole mutations and disulfide bridges. In some embodiments, exemplary embodiments of multifunctional molecules comprising a tumor-associated antigen (TAA)-binding moiety, a TCRβV-binding moiety, and at least one cytokine polypeptide as described herein comprise an exemplary dimerization module, e.g., an Fc region comprising disulfide bridges, but not comprising Knob-in-hole mutations. In some embodiments, exemplary embodiments of multifunctional molecules comprising a tumor-associated antigen (TAA)-binding moiety, a TCRβV-binding moiety, and at least one cytokine polypeptide as described herein comprise an exemplary dimerization module, e.g., an Fc region not comprising disulfide bridges nor Knob-in-hole mutations. In some embodiments, in exemplary embodiment of multifunctional molecules comprising a tumor-associated antigen (TAA)-binding moiety, a TCRβV-binding moiety, and at least one cytokine polypeptide as described herein, the TCRβV-binding moiety comprises an scFv. In some embodiments, in exemplary embodiment of multifunctional molecules comprising a tumor-associated antigen (TAA)-binding moiety, a TCRβV-binding moiety, and at least one cytokine polypeptide as described herein, the TCRβV-binding moiety comprises an Fab.

[0911] In some embodiments, the multifunctional molecule as described herein comprises the at least one cytokine molecule or a functional fragment or functional variant thereof comprising a sequence having at least 50%, 55%, 60%, 65%, 70%, 75%, 80%, 85%, 90%, 95%, 96%, 97%, 98%, 99%, 99.5%, 99.7%, or 99.9% sequence identity to the sequence of SEQ ID NO: 2270.

[0912] In some embodiments, the multifunctional molecule as described herein comprises the at least one cytokine molecule or a functional fragment or functional variant thereof comprising the sequence of SEQ ID NO: 2270.

[0913] In some embodiments, the multifunctional molecule as described herein comprises the first Fc region, the second Fc region, or a combination thereof comprising a sequence having at least 50%, 55%, 60%, 65%, 70%, 75%, 80%, 85%, 90%, 95%, 96%, 97%, 98%, 99%, 99.5%, 99.7%, or 99.9% sequence identity to the sequence of SEQ ID NO: 40, SEQ ID NO: 42, SEQ ID NO: 3645, SEQ ID NO: 3646, SEQ ID NO: 3647. SEQ ID NO:3648, SEQ ID NO: 3649, SEQ ID NO: 3792, or SEQ ID NO: 3794.

[0914] In some embodiments, the multifunctional molecule as described herein comprises the first Fc region, the second Fc region, or a combination thereof comprising the sequence of SEQ ID NO. 40, SEQ ID NO: 42, SEQ ID NO: 3645, SEQ ID NO: 3646, SEQ ID NO: 3647, SEQ ID NO:3648, SEQ ID NO: 3649, SEQ ID NO: 3792, or SEQ ID NO: 3794.

[0915] In some embodiments, the multifunctional molecule as described herein comprises the first Fc region comprising a sequence having at least 50%, 55%, 60%, 65%, 70%, 75%, 80%, 85%, 90%, 95%, 96%, 97%, 98%, 99%, 99.5%, 99.7%, or 99.9% sequence identity to the sequence of SEQ ID NO: 3649 or SEQ ID NO: 3792, the second Fc region comprising a sequence having at least 50%, 55%, 60%, 65%, 70%, 75%, 80%, 85%, 90%, 95%, 96%, 97%, 98%, 99%, 99.5%, 99.7%, or 99.9% sequence identity to the sequence of SEQ ID NO: 3648 or SEQ ID NO: 3794, or a combination thereof. In some embodiments, the multifunctional molecule as described herein comprises the first Fc region comprising a sequence having at least 50%, 55%, 60%, 65%, 70%, 75%, 80%, 85%, 90%, 95%, 96%, 97%, 98%, 99%, 99.5%, 99.7%, or 99.9% sequence identity to the sequence of SEQ ID NO: 3648 or SEQ ID NO: 3794, the second Fc region comprising a sequence having at least 50%, 55%, 60%, 65%, 70%, 75%, 80%, 85%, 90%, 95%, 96%, 97%, 98%, 99%, 99.5%, 99.7%, or 99.9% sequence identity to the sequence of SEQ ID NO: 3648 or SEQ ID NO: 3794, or a combination thereof.

[0916] In some embodiments, the multifunctional molecule as described herein comprises the first Fc region comprising a sequence having at least 50%, 55%, 60%, 65%, 70%, 75%, 80%, 85%, 90%, 95%, 96%, 97%, 98%, 99%, 99.5%, 99.7%, or 99.9% sequence identity to the sequence of SEQ ID NO: 3649 or SEQ ID NO: 3792, and the second Fc region comprising a sequence having at least 50%, 55%, 60%, 65%, 70%, 75%, 80%, 85%, 90%, 95%, 96%, 97%, 98%, 99%, 99.5%, 99.7%, or 99.9% sequence identity to the sequence of SEQ ID NO: 3648 or SEQ ID NO: 3794. In some embodiments, the multifunctional molecule as described herein comprises the first Fc region comprising a sequence having at least 50%, 55%, 60%, 65%, 70%, 75%, 80%, 85%, 90%, 95%, 96%, 97%, 98%, 99%, 99.5%, 99.7%, or 99.9% sequence identity to the sequence of SEQ ID NO: 3648 or SEQ ID NO: 3794, and the second Fc region comprising a sequence having at least 50%, 55%, 60%, 65%, 70%, 75%, 80%, 85%, 90%, 95%, 96%, 97%, 98%, 99%, 99.5%, 99.7%, or 99.9% sequence identity to the sequence of SEQ ID NO: 3648 or SEQ ID NO: 3794.

[0917] In some embodiments, the multifunctional molecule as described herein comprises the first Fc region comprising a sequence having the sequence of SEQ ID NO: 3649 or SEQ ID NO: 3792, the second Fc region comprising the sequence of SEQ ID NO: 3648 or SEQ ID NO: 3794, or a combination thereof. In some embodiments, the multifunctional molecule as described herein comprises the first Fc region comprising the sequence of SEQ ID NO: 3648 or SEQ ID NO: 3794, the second Fc region comprising the sequence of SEQ ID NO: 3648 or SEQ ID NO: 3794, or a combination thereof.

[0918] In some embodiments, the multifunctional molecule as described herein comprises the first Fc region comprising a sequence having the sequence of SEQ ID NO: 3649 or SEQ ID NO: 3792, and the second Fc region comprising the sequence of SEQ ID NO: 3648 or SEQ ID NO: 3794. In some embodiments, the multifunctional molecule as described herein comprises the first Fc region comprising the sequence of SEQ ID NO: 3648 or SEQ ID NO: 3794, and the second Fc region comprising the sequence of SEQ ID NO: 3648 or SEQ ID NO: 3794.

[0919] In some embodiments, the multifunctional molecule as described herein comprises the TCRβV-binding moiety comprising: (i) a VH comprising a sequence having at least 50%, 55%, 60%, 65%, 70%, 75%, 80%, 85%, 90%, 95%, 96%, 97%, 98%, 99%, 99.5%, 99.7%, or 99.9% sequence identity to any one of the heavy chain variable domain amino acid sequences listed in Tables 1, 2, 10B, 11, 12, 13, 21, or 22; (ii) a VL comprising a sequence having at least at least 50%, 55%, 60%, 65%, 70%, 75%, 80%, 85%, 90%, 95%, 96%, 97%, 98%, 99%, 99.5%, 99.7%, 99.9% sequence identity to any one of the light chain variable domain amino acid sequences listed in Tables 1, 2, 10B, 11, 12, 13, 21, or 22; (iii) a combination thereof.

[0920] In some embodiments, the multifunctional molecule as described herein comprises the TCRβV-binding moiety comprising: (i) a VH comprising any one of the heavy chain variable domain amino acid sequences listed in Tables 1, 2, 10B, 11, 12, 13, 21, or 22; (ii) a VL comprising any one of the light chain variable domain amino acid sequences listed in Tables 1, 2, 10B, 11, 12, 13, 21, or 22; (iii) a combination thereof.

[0921] In some embodiments, the multifunctional molecule as described herein comprises the second polypeptide chain comprising a sequence having at least 50%, 55%, 60%, 65%, 70%, 75%, 80%, 85%, 90%, 95%, 96%, 97%, 98%, 99%, 99.5%, 99.7%, or 99.9% sequence identity to the sequence of SEQ ID NO: 1346, a sequence having at least 50%, 55%, 60%, 65%, 70%, 75%, 80%, 85%, 90%, 95%, 96%, 97%, 98%, 99%, 99.5%, 99.7%, or 99.9% sequence identity to the sequence of SEQ ID NO. 1349, a sequence having at least 50%, 55%, 60%, 65%, 70%, 75%, 80%, 85%, 90%, 95%, 96%, 97%, 98%, 99%, 99.5%, 99.7%, or 99.9% sequence identity to the sequence of SEQ ID NO: 2270, and a sequence having at least 50%, 55%, 60%, 65%, 70%, 75%, 80%, 85%, 90%, 95%, 96%, 97%, 98%, 99%, 99.5%, 99.7%, or 99.9% sequence identity to the sequence of SEQ ID NO. 3648.

[0922] In some embodiments, the multifunctional molecule as described herein comprises the second polypeptide chain comprising the sequence of SEQ ID NO: 1346, the sequence of SEQ ID NO: 1349, the sequence of SEQ ID NO: 2270, and the sequence of SEQ ID NO: 3648.

[0923] In some embodiments, the multifunctional molecule as described herein comprises the second polypeptide chain further comprising the sequence of SEQ ID NO: 3801, the sequence of SEQ ID NO: 3309, the sequence of SEQ ID NO: 3308, or any combination thereof.

[0924] In some embodiments, the multifunctional molecule as described herein comprises the second polypeptide chain comprising a sequence having at least 50%, 55%, 60%, 65%, 70%, 75%, 80%, 85%, 90%, 95%, 96%, 97%, 98%, 99%, 99.5%, 99.7%, or 99.9% sequence identity to the sequence of SEQ ID NO: 1346 operatively linked to a sequence having at least 50%, 55%, 60%, 65%, 70%, 75%, 80%, 85%, 90%, 95%, 96%, 97%, 98%, 99%, 99.5%, 99.7%, or 99.9% sequence identity to the sequence of SEQ ID NO: 1349 operatively linked to a sequence having at least 50%, 55%, 60%, 65%, 70%, 75%, 80%, 85%, 90%, 95%, 96%, 97%, 98%, 99%, 99.5%, 99.7%, or 99.9% sequence identity to the sequence of SEQ ID NO: 2270 operatively linked to a sequence having at least 50%, 55%, 60%, 65%, 70%, 75%, 80%, 85%, 90%, 95%, 96%, 97%, 98%, 99%, 99.5%, 99.7%, or 99.9% sequence identity to the sequence of SEQ ID NO: 3648.

[0925] In some embodiments, the multifunctional molecule as described herein comprises the sequence having at least 50%, 55%, 60%, 65%, 70%, 75%, 80%, 85%, 90%, 95%, 96%, 97%, 98%, 99%, 99.5%, 99.7%, or 99.9% sequence identity to the sequence of SEQ ID NO: 1346 operatively linked to the sequence having at least 50%, 55%, 60%, 65%, 70%, 75%, 80%, 85%, 90%, 95%, 96%, 97%, 98%, 99%, 99.5%, 99.7%, or 99.9% sequence identity to the sequence of SEQ ID NO: 1349 via the sequence of SEQ ID NO: 3801.

[0926] In some embodiments, the multifunctional molecule as described herein comprises the sequence having at least 50%, 55%, 60%, 65%, 70%, 75%, 80%, 85%, 90%, 95%, 96%, 97%, 98%, 99%, 99.5%, 99.7%, or 99.9% sequence identity to the sequence of SEQ ID NO: 1349 operatively linked to the sequence having at least 50%, 55%, 60%, 65%, 70%, 75%, 80%, 85%, 90%, 95%, 96%, 97%, 98%, 99%, 99.5%, 99.7%, or 99.9% sequence identity to the sequence of SEQ ID NO: 2270 via the sequence of SEQ ID NO: 3309.

[0927] In some embodiments, the multifunctional molecule as described herein comprises the sequence having at least 50%, 55%, 60%, 65%, 70%, 75%, 80%, 85%, 90%, 95%, 96%, 97%, 98%, 99%, 99.5%, 99.7%, or 99.9% sequence identity to the sequence of SEQ ID NO: 2270 operatively linked to the sequence having at least 50%, 55%, 60%, 65%, 70%, 75%, 80%, 85%, 90%, 95%, 96%, 97%, 98%, 99%, 99.5%. 99.7%, or 99.9% sequence identity to the sequence of SEQ ID NO: 3648 via the sequence of SEQ ID NO: 3308.

[0928] In some embodiments, the multifunctional molecule as described herein comprises the second polypeptide chain comprising the sequence of SEQ ID NO: 1346 operatively linked to the sequence of SEQ ID NO: 1349 operatively linked to the sequence of SEQ ID NO: 2270 operatively linked to the sequence of SEQ ID NO: 3648.

[0929] In some embodiments, the multifunctional molecule as described herein comprises the sequence of SEQ ID NO: 1346 operatively linked to the sequence of SEQ ID NO: 1349 via the sequence of SEQ ID NO: 3801.

[0930] In some embodiments, the multifunctional molecule as described herein comprises the sequence of SEQ ID NO: 1349 operatively linked to the sequence of SEQ ID NO: 2270 via the sequence of SEQ ID NO: 3309.

[0931] In some embodiments, the multifunctional molecule as described herein comprises the sequence of SEQ ID NO: 2270 operatively linked to the sequence of SEQ ID NO: 3648 via the sequence of SEQ ID NO: 3308.

[0932] In some embodiments, the multifunctional molecule as described herein comprises the second polypeptide chain comprising a sequence having at least 50%, 55%, 60%, 65%, 70%, 75%, 80%, 85%, 90%, 95%, 96%, 97%, 98%, 99%, 99.5%, 99.7%, or 99.9% sequence identity to the sequence of SEQ ID NO: 3800.

[0933] In some embodiments, the multifunctional molecule as described herein comprises the second polypeptide chain comprising the sequence of SEQ ID NO: 3800.

[0934] In some embodiments, the multifunctional molecule as described herein comprises a sequence having at least 50%, 55%, 60%, 65%, 70%, 75%, 80%, 85%, 90%, 95%, 96%, 97%, 98%, 99%, 99.5%, 99.7%, or 99.9% sequence identity to any component sequences listed in Table 21, e.g., the VH sequences of TCRvβ listed in Table 21, the VL sequences of TCRvβ listed in Table 21, Fc region sequences listed in Table 21, cytokine sequences listed in Table 21, immunoglobulin light chain constant region sequences listed in Table 21, and linker sequences listed in Table 21, or any combination thereof. In some embodiments, the multifunctional molecule as described herein comprises a sequence having at least 50%, 55%, 60%, 65%, 70%, 75%, 80%, 85%, 90%, 95%, 96%, 97%, 98%, 99%, 99.5%, 99.7%, or 99.9% sequence identity to any chain or polypeptide chain sequences listed in Table 21.

[0935] In some embodiments, the multifunctional molecule as described herein comprises any component sequences listed in Table 21, e.g., the VH sequences of TCRvβ listed in Table 21, the VL sequences of TCRvβ listed in Table 21. Fc region sequences listed in Table 21, cytokine sequences listed in Table 21, immunoglobulin light chain constant region sequences listed in Table 21, and linker sequences listed in Table 21, or any combination thereof. In some embodiments, the multifunctional molecule as described herein comprises any chain or polypeptide chain sequences listed in Table 21.

[0936] In some embodiments, the multifunctional molecule as provided herein comprises, from the N-terminus to the C-terminus, the following configuration:
[0937] A-, B-[dimerization module]-C, -D.

[0938] In some embodiments, the dimerization module comprises a first immunoglobulin chain constant region and a second immunoglobulin chain constant region.

[0939] In some embodiments. A and C are linked to the first immunoglobulin chain constant region; and B and D are linked to the second immunoglobulin chain constant region.

[0940] In some embodiments, A or C is the tumor-associated antigen binding moiety.

[0941] In some embodiments, B and D are independently absent or at least one cytokine molecule or a functional fragment or functional variant thereof.

[0942] In some embodiments, when A is the tumor-associated antigen binding moiety, C is absent or at least one cytokine molecule or a functional fragment or functional variant thereof.

[0943] In some embodiments, when C is the tumor-associated antigen binding moiety. A is absent or at least one cytokine molecule or a functional fragment or functional variant thereof.

[0944] In some embodiments, the Fc region comprises one or more mutations that modify the binding to the Fc gamma receptors. In some embodiments, the Fc region comprises one or more mutations that reduce the binding to Fc gamma receptors. In some embodiments, the Fc region comprises N297A mutation.

[0945] In some embodiments the multifunctional molecule consists of two polypeptide chains. In some embodiments the multifunctional molecule consists of two polypeptide chains, wherein the first polypeptide chain comprises an anti-tumor antigen binder, e.g., an scFv that binds to a tumor antigen. In some embodiments the multifunctional molecule consists of two polypeptide chains, wherein the first polypeptide chain comprises an anti-tumor antigen binder, e.g., an scFv that binds to a tumor antigen, linked to an Fc, e.g., a human IgG1 hole N297A. In some embodiments the multifunctional molecule consists of two polypeptide chains, wherein the first polypeptide chain comprises an anti-tumor antigen binder, e.g., an scFv that binds to a tumor antigen, linked to an Fc, e.g., a human IgG1 hole N297A; and the second polypeptide chain that comprises an anti-TCRvB binder linked to a cytokine, e.g., IL-2, wherein the cytokine is linked to an Fc, e.g., a human IgG1 knob cys N297A. In some embodiments the multifunctional molecule consists of two polypeptide chains, wherein the first polypeptide chain comprises an anti-tumor antigen binder, e.g., an scFv that binds to a tumor antigen, linked to an Fc, e.g., a human IgG1 hole N297A; and the second polypeptide chain comprises, from N to C terminus an anti-TCRvB binder linked to a cytokine, e.g., IL-2, linked to an Fc. e.g., a human IgG1 knob cys N297A. In some embodiments the multifunctional molecule consists of two polypeptide chains, wherein the first polypeptide chain comprises an anti-tumor antigen binder, e.g., an scFv that binds to a tumor antigen, linked to an Fc, e.g., a human IgG1 hole N297A; and the second polypeptide chain comprises SEQ ID NO 3800.

[0946] In some embodiments the multifunctional molecule consists of three polypeptide chains. In some embodiments the multifunctional molecule consists of three polypeptide chains, wherein the first polypeptide chain comprises a first portion of an anti-tumor antigen binder that binds to a tumor antigen, e.g., an first portion of an Fab, e.g. heavy chain variable domain of a Fab. In some embodiments the multifunctional molecule consists of three polypeptide chains, wherein the first polypeptide chain comprises a first portion of an anti-tumor antigen binder that binds to a tumor antigen, e.g., an first portion of an Fab, e.g. heavy chain variable domain of a Fab, linked to an Fc, e.g., a human IgG1 bole N297A. In some embodiments the multifunctional molecule consists of three polypeptide chains, wherein the first polypeptide chain comprises a first portion of an anti-tumor antigen binder that binds to a tumor antigen, e.g., an first portion of an Fab, e.g. heavy chain variable domain of a Fab; and the second polypeptide chain that comprises an anti-TCRvB binder linked to a cytokine, e.g., IL-2, wherein the cytokine is linked to an Fc, e.g., a human IgG1 knob cys N297A. In some embodiments, the multifunctional molecule consists of three polypeptide chains, wherein the first polypeptide chain comprises a first portion of an anti-tumor antigen binder that binds to a tumor antigen, e.g., an first portion of an Fab, e.g, heavy chain variable domain of a Fab, linked to an Fc, e.g., a human IgG1 hole N297A; and the second polypeptide chain comprises, from N to C terminus an anti-TCRvB binder linked to a cytokine, e.g., IL-2, linked to an Fc, e.g., a human IgG1 knob cys N297A. In some embodiments, the multifunctional molecule consists of three polypeptide chains, wherein the first polypeptide chain comprises a first portion of an anti-tumor antigen binder that binds to a tumor antigen, e.g., an first portion of an Fab, e.g. heavy chain variable domain of a Fab, linked to an Fc, e.g., a human IgG1 hole N297A: and the second polypeptide chain comprises SEQ ID NO 3800. In some embodiments, the multifunctional molecule consists of three polypeptide chains, wherein the first polypeptide chain comprises a first portion of an anti-tumor antigen binder that binds to a tumor antigen, e.g., an first portion of an Fab, e.g, heavy chain variable domain of a Fab, linked to an Fc, e.g., a human IgG1 hole N297A; and the second polypeptide chain comprises, from N to C terminus an anti-TCRvB binder linked to a cytokine, e.g., IL-2, linked to an Fc, e.g., a human IgG1 knob cys N297A; and the third polypeptide chain comprises a second portion of the anti-tumor antigen binder that binds to a tumor antigen, e.g., a second portion of the Fab, e.g., a light chain variable domain of the Fab. In some embodiments, the multifunctional molecule consists of three polypeptide chains, wherein the first polypeptide chain comprises a first portion of an anti-tumor antigen binder that binds to a tumor antigen, e.g., an first portion of an Fab, e.g, heavy chain variable domain of a Fab, linked to an Fc, e.g., a human IgG1 hole N297A; and the second polypeptide chain comprises SEQ ID NO 3800; and the third polypeptide chain comprises a second portion of the anti-tumor antigen binder that binds to a tumor antigen, e.g., a second portion of the Fab, e.g., a light chain variable domain of the Fab.

### Linkers

[0947] The multispecific or multifunctional molecule as described herein can further include a linker, e.g., a linker between one or more of: the antigen binding domain and the cytokine molecule, the antigen binding domain and the immune cell engager, the antigen binding domain and the stromal modifying moiety, the cytokine molecule and the immune cell engager, the cytokine molecule and the stromal modifying moiety, the immune cell engager and the stromal modifying moiety, the antigen binding domain and the immunoglobulin chain constant region, the cytokine molecule and the immunoglobulin chain constant region, the immune cell engager and the immunoglobulin chain constant region, or the stromal modifying moiety and the immunoglobulin chain constant region. In some embodiments, the linker is chosen from: a cleavable linker, a non-cleavable linker, a peptide linker, a flexible linker, a rigid linker, a helical linker, or a non-helical linker, or a combination thereof.

[0948] In some embodiments, the multispecific molecule can include one, two, three or four linkers, e.g., a peptide linker. In some embodiments, the peptide linker includes Gly and Ser. In some embodiments, the peptide linker is selected from GGGGS (SEQ ID NO: 3307): GGGGSGGGGS (SEQ ID NO: 3308); GGGGSGGGGSGGGGS (SEQ ID NO: 3309): DVPSGPGGGGGSGGGGS (SEQ ID NO: 3310); and GGGGGGGGSGGGGGS (SEQ ID NO: 3643). In some embodiments, the peptide linker is a A (EAAAK) nA (SEQ ID NO: 3437) family of linkers (e.g., as described in Protein Eng. (2001) 14 (8): 529-532). These are stiff helical linkers with n ranging from 2-5. In some embodiments, the peptide linker is selected from AEAAAKEAAAKAAA (SEQ ID NO: 3314): AEAAAKEAAAKEAAAKAAA (SEQ ID NO: 3315): AEAAAKEAAAKEAAAKEAAAKAAA (SEQ ID NO: 3316); and AEAAAKEAAAKEAAAKEAAAKEAAAKAAA (SEQ ID NO: 3317).

### Nucleic Acids

[0949] Described herein, in certain embodiments, is an isolated nucleic acid molecule comprising a nucleotide sequence having at least 75%, 80%, 85%, 90%, 95%, 99%, 99.5%, 99.9%, or 100% sequence identity to the nucleotide sequence encoding the multifunctional polypeptide molecule as described herein.

[0950] Nucleic acids encoding the aforementioned antibody molecules, e.g., anti-TCRβV antibody molecules, multispecific or multifunctional molecules are also disclosed.

[0951] In certain embodiments, the invention features nucleic acids comprising nucleotide sequences that encode heavy and light chain variable regions and CDRs or hypervariable loops of the antibody molecules, as described herein. For example, the invention features a first and second nucleic acid encoding heavy and light chain variable regions, respectively, of an antibody molecule chosen from one or more of the antibody molecules as described herein. The nucleic acid can comprise a nucleotide sequence as set forth in the tables herein, or a sequence substantially identical thereto (e.g., a sequence at least about 85%, 90%, 95%, 99% or more identical thereto, or which differs by no more than 3, 6, 15, 30, or 45 nucleotides from the sequences shown in the tables herein.

[0952] In certain embodiments, the nucleic acid can comprise a nucleotide sequence encoding at least one, two, or three CDRs or hypervariable loops from a heavy chain variable region having an amino acid sequence as set forth in the tables herein, or a sequence substantially homologous thereto (e.g., a sequence at least about 85%, 90%, 95%, 99% or more identical thereto, and/or baving one or more substitutions, e.g., conserved substitutions). In other embodiments, the nucleic acid can comprise a nucleotide sequence encoding at least one, two, or three CDRs or hypervariable loops from a light chain variable region having an amino acid sequence as set forth in the tables herein, or a sequence substantially homologous thereto (e.g., a sequence at least about 85%, 90%, 95%, 99% or more identical thereto, and/or having one or more substitutions, e.g., conserved substitutions) In yet another embodiment, the nucleic acid can comprise a nucleotide sequence encoding at least one, two, three, four, five, or six CDRs or hypervariable loops from heavy and light chain variable regions having an amino acid sequence as set forth in the tables herein, or a sequence substantially homologous thereto (e.g., a sequence at least about 85%, 90%, 95%, 99% or more identical thereto, and/or having one or more substitutions, e.g., conserved substitutions).

[0953] In certain embodiments, the nucleic acid can comprise a nucleotide sequence encoding at least one, two, or three CDRs or hypervariable loops from a heavy chain variable region having the nucleotide sequence as set forth in the tables herein, a sequence substantially homologous thereto (e.g., a sequence at least about 85%, 90%, 95%, 99% or more identical thereto, and/or capable of hybridizing under the stringency conditions described herein) In another embodiment, the nucleic acid can comprise a nucleotide sequence encoding at least one, two, or three CDRs or hypervariable loops from a light chain variable region having the nucleotide sequence as set forth in the tables herein, or a sequence substantially homologous thereto (e.g., a sequence at least about 85%, 90%, 95%, 99% or more identical thereto, and/or capable of hybridizing under the stringency conditions described herein). In yet another embodiment, the nucleic acid can comprise a nucleotide sequence encoding at least one, two, three, four, five, or six CDRs or hypervariable loops from heavy and light chain variable regions having the nucleotide sequence as set forth in the tables herein, or a sequence substantially homologous thereto (e.g., a sequence at least about 85%, 90%, 95%, 99% or more identical thereto, and/or capable of hybridizing under the stringency conditions described herein).

[0954] In certain embodiments, the nucleic acid can comprise a nucleotide sequence encoding a cytokine molecule, an immune cell engager, or a stromal modifying moiety as described herein.

[0955] In another aspect, the application features host cells and vectors containing the nucleic acids described herein. The nucleic acids may be present in a single vector or separate vectors present in the same host cell or separate host cell, as described in more detail hereinbelow.

### Vectors

[0956] Described herein, in certain embodiments, is a vector comprising one or more of the nucleic acid molecules as described herein.

[0957] Further provided herein are vectors comprising the nucleotide sequences encoding antibody molecules, e.g., anti-TCRβV antibody molecules, or a multispecific or multifunctional molecule described herein. In some embodiments, the vectors comprise nucleic acid sequences encoding antibody molecules, e.g., anti-TCRβV antibody molecules, or multispecific or multifunctional molecule described herein. In some embodiments, the vectors comprise the nucleotide sequences described herein. The vectors include, but are not limited to, a virus, plasmid, cosmid, lambda phage or a yeast artificial chromosome (YAC).

[0958] Numerous vector systems can be employed. For example, one class of vectors utilizes DNA elements which are derived from animal viruses such as, for example, bovine papilloma virus, polyoma virus, adenovirus, vaccinia virus, baculovirus, retroviruses (Rous Sarcoma Virus, MMTV or MOMLV) or SV40 virus. Another class of vectors utilizes RNA elements derived from RNA viruses such as Semliki Forest virus, Eastern Equine Encephalitis virus and Flaviviruses.

[0959] Additionally, cells which have stably integrated the DNA into their chromosomes may be selected by introducing one or more markers which allow for the selection of transfected host cells. The marker may provide, for example, prototropy to an auxotrophic host, biocide resistance (e.g., antibiotics), or resistance to heavy metals such as copper, or the like. The selectable marker gene can be either directly linked to the DNA sequences to be expressed, or introduced into the same cell by cotransformation. Additional elements may also be needed for optimal synthesis of mRNA. These elements may include splice signals, as well as transcriptional promoters, enhancers, and termination signals.

[0960] Once the expression vector or DNA sequence containing the constructs has been prepared for expression, the expression vectors may be transfected or introduced into an appropriate host cell. Various techniques may be employed to achieve this, such as, for example, protoplast fusion, calcium phosphate precipitation, electroporation, retroviral transduction, viral transfection, gene gun, lipid based transfection or other conventional techniques. In the case of protoplast fusion, the cells are grown in media and screened for the appropriate activity.

[0961] Methods and conditions for culturing the resulting transfected cells and for recovering the antibody molecule produced are known to those skilled in the art, and may be varied or optimized depending upon the specific expression vector and mammalian host cell employed, based upon the present description.

### Cells

[0962] Described herein, in certain embodiments, is a cell comprising the nucleic acid as described herein or the vector as described herein.

[0963] In another aspect, described herein are host cells and vectors containing the nucleic acids. The nucleic acids may be present in a single vector or separate vectors present in the same host cell or separate host cell. The host cell can be a eukaryotic cell, e.g., a mammalian cell, an insect cell, a yeast cell, or a prokaryotic cell, e.g., E. coli. For example, the mammalian cell can be a cultured cell or a cell line. Exemplary mammalian cells include lymphocytic cell lines (e.g., NSO), Chinese hamster ovary cells (CHO), COS cells, oocyte cells, and cells from a transgenic animal, e.g., mammary epithelial cell.

[0964] In some embodiments, described herein are host cells comprising a nucleic acid encoding an antibody molecule as described herein.

[0965] In some embodiments, described herein are the host cells genetically engineered to comprise nucleic acids encoding the antibody molecule.

[0966] In some embodiments, the host cells are genetically engineered by using an expression cassette. The phrase “expression cassette.” refers to nucleotide sequences, which are capable of affecting expression of a gene in hosts compatible with such sequences. Such cassettes may include a promoter, an open reading frame with or without introns, and a termination signal. Additional factors necessary or helpful in effecting expression may also be used, such as, for example, an inducible promoter.

[0967] In some embodiments, described herein are host cells comprising the vectors described herein. The cell can be, but is not limited to, a eukaryotic cell, a bacterial cell, an insect cell, or a human cell. Suitable eukaryotic cells include, but are not limited to, Vero cells, HeLa cells. COS cells, CHO cells, HEK293 cells, BHK cells and MDCKII cells. Suitable insect cells include, but are not limited to, Sf9 cells.

Method of Expanding Cells with Anti-TCRVB Antibodies

[0968] Any of the compositions and methods described herein can be used to expand an immune cell population. An immune cell provided herein includes an immune cell derived from a hematopoietic stem cell or an immune cell derived from a non-hematopoietic stem cell, e.g., by differentiation or de-differentiation.

[0969] An immune cell includes a hematopoietic stem cell, progeny thereof and/or cells that have differentiated from said HSC, e.g., lymphoid cells or myeloid cells. An immune cell can be an adaptive immune cell or an innate immune cell. Examples of immune cells include T cells. B cells, Natural Killer cells, Natural Killer T cells, neutrophils, dendritic cells, monocytes, macrophages, and granulocytes.

[0970] In some embodiments, an immune cell is a T cell. In some embodiments, a T cell includes a CD4+ T cell, a CD8+ T cell, a TCR alpha-beta T cell, a TCR gamma-delta T cell. In some embodiments, a T cell comprises a memory T cell (e.g., a central memory T cell, or an effector memory T cell (e.g., a TEMRA) or an effector T cell. In some embodiments, a T cell comprises a tumor infiltrating lymphocyte (TIL).

[0971] In some embodiments, an immune cell is an NK cell.

[0972] In some embodiments, an immune cell is a TIL. TILs are immune cells (e.g., T cells, B cells or NK cells) that can be found in a tumor or around a tumor (e.g., in the stroma or tumor microenvironment of a tumor), e.g., a solid tumor, e.g., as described herein. TILs can be obtained from a sample from a subject having cancer, e.g., a biopsy or a surgical sample. In some embodiments, TILs can be expanded using a method as described herein. In some embodiments, a population of expanded TILs, e.g., expanded using a method as described herein, can be administered to a subject to treat a disease, e.g., a cancer.

[0973] In some embodiments, immune cells, e.g., T cells (e.g., TILs), can be obtained from a unit of blood collected from a subject using any number of techniques known to the skilled artisan, such as Ficoll™ separation. In one aspect, cells from the circulating blood of an individual are obtained by apheresis. The apheresis product typically contains lymphocytes, including T cells, monocytes, granulocytes, B cells, other nucleated white blood cells, red blood cells, and platelets. In one aspect, the cells collected by apheresis may be washed to remove the plasma fraction and, optionally, to place the cells in an appropriate buffer or media for subsequent processing steps. In some embodiments, the cells are washed with phosphate buffered saline (PBS). In an alternative embodiment, the wash solution lacks calcium and may lack magnesium or may lack many if not all divalent cations. The methods described herein can include more than one selection step, e.g., more than one depletion step.

[0974] In some embodiments, the methods of the application can utilize culture media conditions comprising DMEM. DMEM F12. RPMI 1640, and/or AIM V media. The media can be supplemented with glutamine, HEPES buffer (e.g., 10 mM), serum (e.g., heat-inactivated serum, e.g., 10%), and/or beta mercaptoethanol (e.g., 55 μM). IN some embodiments, the culture conditions as described herein comprise one or more supplements, cytokines, growth factors, or hormones. In some embodiments, the culture condition comprises one or more of IL-2, IL-15, or IL-7, or a combination thereof.

[0975] Immune effector cells such as T cells may be activated and expanded generally using methods as described, for example, in U.S. Pat. Nos. 6,352,694; 6,534,055; or 6,905,680. Generally, a population of immune cells, may be expanded by contact with an agent that stimulates a CD3/TCR complex associated signal and a ligand that stimulates a costimulatory molecule on the surface of the T cells; and/or by contact with a cytokine, e.g., IL-2, IL-15 or IL-7. T cell expansion protocols can also include stimulation, such as by contact with an anti-CD3 antibody, or antigen-binding fragment thereof, or an anti-CD2 antibody immobilized on a surface, or by contact with a protein kinase C activator (e.g., bryostatin) in conjunction with a calcium ionophore. For example, a population of T cells can be contacted with an anti-CD3 antibody and an anti-CD28 antibody, under conditions appropriate for stimulating proliferation of the T cells. To stimulate proliferation of either CD4+ T cells or CD8+ T cells, an anti-CD3 antibody and an anti-CD28 antibody can be used. Examples of an anti-CD28 antibody include 9.3, B-T3, XR-CD28 (Diaclone, Besançon, France) can be used as can other methods commonly known in the art (Berg et al., Transplant Proc. 30(8): 3975-3977, 1998; Haanen et al., J. Exp. Med. 190(9): 13191328, 1999; Garland et al., J. Immunol Meth. 227(1-2):53-63, 1999).

[0976] A TIL population can also be expanded by methods known in the art. For example, a population of TILs can be expanded as described in Hall et al., Journal for Immuno Therapy of Cancer (2016) 4:61, the entire contents of which are hereby incorporated by reference. Briefly, TILs can be isolated from a sample by mechanical and/or physical digestion. The resultant TIL population can be stimulated with an anti-CD3 antibody in the presence of non-dividing feeder cells. In some embodiments, the TIL population can be cultured, e.g., expanded, in the presence of IL-2, e.g., human IL-2. In some embodiments, the TIL cells can be cultured, e.g., expanded for a period of at least 1-21 days, e.g., at least 1, 2, 3, 4, 5, 6, 7, 8, 9, 10, 11, 12, 13, 14, 15, 16, 17, 18, 19, 20 or 21 days.

[0977] As described herein, in some embodiments, an immune cell population (e.g., a T cell (e.g., a T_{EMRA} cell or a TIL population) can be expanded by contacting the immune cell population with an anti-TCRVB antibody, e.g., as described herein.

[0978] In some embodiments, the expansion occurs in vivo, e.g., in a subject. In some embodiments, a subject is administered the multispecific or multifunctional molecules comprising TCRβV-binding moieties as described herein resulting in expansion of immune cells in vivo.

[0979] In some embodiments, the expansion occurs ex vivo, e.g., in vitro. In some embodiments, cells from a subject, e.g., T cells, e.g., TIL cells, are expanded in vitro with the multispecific or multifunctional molecules as described herein. In some embodiments, the expanded TILs are administered to the subject to treat a disease or a symptom of a disease.

[0980] In some embodiments, a method of expansion as described herein results in an expansion of at least 1.1-10 fold, 10-20 fold, or 20-50 fold expansion. In some embodiments, the expansion is at least 1.1, 1.2, 1.3, 1.4, 1.5, 2, 3, 4, 5, 6, 7, 8, 9, 10, 15, 20, 25, 30, 35, 40, 45 or 50 fold expansion.

[0981] In some embodiments, a method of expansion as described herein comprises culturing, e.g., expanding, the cells for at least about 4 hours, 6 hours, 10 hours, 12 hours, 15 hours. 18 hours, 20 hours, or 22 hours. In some embodiments, a method of expansion as described herein comprises culturing, e.g., expanding, the cells for at least 1, 2, 3, 4, 5, 6, 7, 8, 9, 10, 11, 12, 13, 14, 15, 16, 17, 18, 19, 20 or 21 days. In some embodiments, a method of expansion as described herein comprises culturing, e.g., expanding, the cells for at least about 1 week, 2 weeks, 3 weeks, 4 weeks, 5 weeks, 6 weeks, 7 weeks or 8 weeks.

[0982] In some embodiments, a method of expansion as described herein is performed on immune cells obtained from a healthy subject.

[0983] In some embodiments, a method of expansion as described herein is performed on immune cells (e.g., TILs) obtained from a subject having a disease, e.g., a cancer, e.g., a solid tumor as described herein.

[0984] In some embodiments, a method of expansion as described herein further comprises contacting the population of cells with an agent, that promotes, e.g., increases, immune cell expansion. In some embodiments, the agent comprises an immune checkpoint inhibitor, e.g., a PD-1 inhibitor, a LAG-3 inhibitor, a CTLA4 inhibitor, or a TIM-3 inhibitor. In some embodiments, the agent comprises a 4-1BB agonist, e.g., an anti-4-1BB antibody.

[0985] Without wishing to be bound by theory, in some embodiments, the multispecific or multifunctional molecules as described herein can expand, e.g., selectively or preferentially expand, T cells expressing a T cell receptor (TCR) comprising a TCR alpha and/or TCR beta molecule, e.g., TCR alpha-beta T cells (αβ T cells). In some embodiments, the multispecific or multifunctional molecules as described herein do not expand, or induce proliferation of T cells expressing a TCR comprising a TCR gamma and/or TCR delta molecule, e.g., TCR gamma-delta T cells (γδ T cells). In some embodiments, the multispecific or multifunctional molecules as described herein selectively or preferentially expand αβ T cells over γδ T cells.

[0986] Without wishing to be bound by theory, it is believed that, in some embodiments, γδ T cells are associated with cytokine release syndrome (CRS) and/or neurotoxicity (NT). In some embodiments, the multispecific or multifunctional molecules as described herein result in selective expansion of non-γδ T cells, e.g., expansion of αβ T cells, thus reducing CRS and/or NT.

[0987] In some embodiments, any of the compositions or methods as described herein result in an immune cell population having a reduction of, e.g., depletion of, γδ T cells. In some embodiments, the immune cell population is contacted with an agent that reduces, e.g., inhibits or depletes, γδ T cells, e.g., an anti-IL-17 antibody or an agent that binds to a TCR gamma and/or TCR delta molecule.

### CRS Grading

[0988] In some embodiments, CRS (Cytokine Release Syndrome) can be graded in severity from 1-5 as follows. Grades 1-3 are less than severe CRS. Grades 4-5 are severe CRS. For Grade 1 CRS, only symptomatic treatment is needed (e.g., nausea, fever, fatigue, myalgias, malaise, headache) and symptoms are not life threatening. For Grade 2 CRS, the symptoms require moderate intervention and generally respond to moderate intervention. Subjects having Grade 2 CRS develop hypotension that is responsive to either fluids or one low-dose vasopressor; or they develop grade 2 organ toxicity or mild respiratory symptoms that are responsive to low flow oxygen (<40% oxygen). In Grade 3 CRS subjects, hypotension generally cannot be reversed by fluid therapy or one low-dose vasopressor. These subjects generally require more than low flow oxygen and have grade 3 organ toxicity (e.g., renal or cardiac dysfunction or coagulopathy) and/or grade 4 transaminitis. Grade 3 CRS subjects require more aggressive intervention, e.g., oxygen of 40% or higher, high dose vasopressor(s), and/or multiple vasopressors. Grade 4 CRS subjects suffer from immediately life-threatening symptoms, including grade 4 organ toxicity or a need for mechanical ventilation. Grade 4 CRS subjects generally do not have transaminitis. In Grade 5 CRS subjects, the toxicity causes death. Sets of criteria for grading CRS are provided herein as Table 5, Table 6, and Table 7. Unless otherwise specified. CRS as used herein refers to CRS according to the criteria of Table 6.

[0989] In some embodiments, CRS is graded according to Table 5.

[0990] The term “cytokine profile” as used herein, refers to the level and/or activity of on one or more cytokines or chemokines, e.g., as described herein. In some embodiments, a cytokine profile comprises the level and/or activity of a naturally occurring cytokine, a fragment or a functional fragment or a functional variant thereof. In some embodiments, a cytokine profile comprises the level and/or activity of one or more cytokines and/or one or more chemokines (e.g., as described herein). In some embodiments, a cytokine profile comprises the level and/or activity of a naturally occurring cytokine, a fragment or a functional fragment or a functional variant thereof. In some embodiments, a cytokine profile comprises the level and/or activity of a naturally occurring chemokine, a fragment or a functional fragment or a functional variant thereof. In some embodiments, a cytokine profile comprises the level and/or activity of one or more of: IL-2 (e.g., full length, a variant, or a fragment thereof); IL-1beta (e.g., full length, a variant, or a fragment thereof); IL-6 (e.g., full length, a variant, or a fragment thereof): TNFα (e.g., full length, a variant, or a fragment thereof); IFNgamma (e.g., full length, a variant, or a fragment thereof) IL-10 (e.g., full length, a variant, or a fragment thereof); IL-4 (e.g., full length, a variant, or a fragment thereof): TNF alpha (e.g., full length, a variant, or a fragment thereof): IL-12p70 (e.g., full length, a variant, or a fragment thereof); IL-13 (e.g., full length, a variant, or a fragment thereof): IL-8 (e.g., full length, a variant, or a fragment thereof): Eotaxin (e.g., full length, a variant, or a fragment thereof): Eotaxin-3 (e.g., full length, a variant, or a fragment thereof): IL-8 (HA) (e.g., full length, a variant, or a fragment thereof): IP-10 (e.g., full length, a variant, or a fragment thereof); MCP-1 (e.g., full length, a variant, or a fragment thereof); MCP-4 (e.g., full length, a variant, or a fragment thereof); MDC (e.g., full length, a variant, or a fragment thereof); MIP-1a (e.g., full length, a variant, or a fragment thereof): MIP-1b (e.g., full length, a variant, or a fragment thereof): TARC (e.g., full length, a variant, or a fragment thereof): GM-CSF (e.g., full length, a variant, or a fragment thereof): IL-12 23p40 (e.g., full length, a variant, or a fragment thereof): IL-15 (e.g., full length, a variant, or a fragment thereof); IL-1β (e.g., full length, a variant, or a fragment thereof): IL-17a (e.g., full length, a variant, or a fragment thereof): IL-1a (e.g., full length, a variant, or a fragment thereof): IL-5 (e.g., full length, a variant, or a fragment thereof): IL-7 (e.g., full length, a variant, or a fragment thereof): TNF-beta (e.g., full length, a variant, or a fragment thereof); or VEGF (e.g., full length, a variant, or a fragment thereof). In some embodiments, a cytokine profile includes secretion of one or more cytokines or chemokines. In some embodiments, a cytokine in a cytokine profile can be modulated, e.g., increased or decreased, by an anti-TCRβV antibody molecule described herein. In some embodiments, the cytokine profile includes cytokines associated with a cytokine storm or cytokine release syndrome (CRS), e.g., IL-6, IL-1beta, TNFalpha and IL-10.

### Pharmaceutical Compositions

[0991] Described herein, in certain embodiments, is a pharmaceutical composition comprising the multifunctional polypeptide molecule as described herein, the nucleic acid molecules as described herein, the vector as described herein, or the cell as described herein, and a pharmaceutically acceptable carrier, excipient, or diluent.

[0992] Pharmaceutical compositions or formulations comprising the agent, e.g., the multifunctional or multispecific molecules, of the described compositions and for use in any of the described methods can be prepared according to conventional techniques well known in the pharmaceutical industry and described in the published literature. In some embodiments, a pharmaceutical composition or formulation for treating a subject comprises an effective amount of any the multifunctional or multispecific molecules or the compositions as described herein, or a pharmaceutically acceptable salt, solvate, hydrate or ester thereof. The pharmaceutical formulation comprising the multifunctional or multispecific molecules as described herein may further comprise a pharmaceutically acceptable excipient, diluent or carrier.

[0993] Pharmaceutically acceptable salts are suitable for use in contact with the tissues of humans and lower animals without undue toxicity, irritation, allergie response, etc., and are commensurate with a reasonable benefit/risk ratio. (Sec, e.g., S. M. Berge, et al., J. Pharmaceutical Sciences, 66:1-19 (1977), incorporated herein by reference for this purpose. The salts can be prepared in situ during the final isolation and purification of the compounds, or separately by reacting the free base form with a suitable organic acid. Examples of pharmaceutically acceptable, nontoxic acid addition salts are salts of an amino group formed with inorganic acids such as hydrochloric acid, hydrobromic acid, phosphoric acid, sulfuric acid and perchloric acid or with organic acids such as acetic acid, oxalic acid, maleic acid, tartaric acid, citric acid, succinic acid or malonic acid or by using other documented methodologies such as ion exchange. Other pharmaceutically acceptable salts include adipate, alginate, ascorbate, aspartate, benzenesulfonate, benzoate, bisulfate, borate, butyrate, camphorate, camphorsulfonate, citrate, cyclopentanepropionate, digluconate, dodecylsulfate, ethanesulfonate, formate, fumarate, glucoheptonate, glycerophosphate, gluconate, hemisulfate, heptanoate, hexanoate, hydroiodide, 2-hydroxy-ethanesulfonate, lactobionate, lactate, laurate, lauryl sulfate, malate, maleate, malonate, methanesulfonate, 2-naphthalenesulfonate, nicotinate, nitrate, oleate, oxalate, palmitate, pamoate, pectinate, persulfate, 3-phenylpropionate, phosphate, picrate, pivalate, propionate, stearate, succinate, sulfate, tartrate, thiocyanate, p-toluenesulfonate, undecanoate, valerate salts, and the like. Representative alkali or alkaline earth metal salts include sodium, lithium, potassium, calcium, magnesium, and the like. Further pharmaceutically acceptable salts include, when appropriate, nontoxic ammonium, quatemary ammonium, and amine cations formed using counterions such as halide, hydroxide, carboxylate, sulfate, phosphate, nitrate, loweralkyl sulfonate and aryl sulfonate.

[0994] In some embodiments, the compositions are formulated into any of many possible dosage forms such as, but not limited to, tablets, capsules, gel capsules, liquid syrups, soft gels, suppositories, and enemas. In some embodiments, the compositions are formulated as suspensions in aqueous, non-aqueous or mixed media. Aqueous suspensions may further contain substances that increase the viscosity of the suspension including, for example, sodium carboxymethylcellulose, sorbitol and/or dextran. The suspension may also contain stabilizers. In some embodiments, a pharmaceutical formulation or composition as described herein includes, but is not limited to, a solution, emulsion, microemulsion, foam or liposome-containing formulation (e.g., cationic or noncationic liposomes).

[0995] The pharmaceutical composition or formulation described herein may comprise one or more penetration enhancers, carriers, excipients or other active or inactive ingredients as appropriate and well known to those of skill in the art or described in the published literature. In some embodiments, liposomes also include sterically stabilized liposomes, e.g., liposomes comprising one or more specialized lipids. These specialized lipids result in liposomes with enhanced circulation lifetimes. In some embodiments, a sterically stabilized liposome comprises one or more glycolipids or is derivatized with one or more hydrophilic polymers, such as a polyethylene glycol (PEG) moiety. In some embodiments, a surfactant is included in the pharmaceutical formulation or compositions. The use of surfactants in drug products, formulations and emulsions is well known in the art. In some embodiments, the present disclosure employs a penetration enhancer to effect the efficient delivery of the multifunctional or multispecific molecules or the compositions as described herein, e.g., to aid diffusion across cell membranes and/or enhance the permeability of a lipophilic drug. In some embodiments, the penetration enhancers are a surfactant, fatty acid, bile salt, chelating agent, or non-chelating nonsurfactant.

[0996] In some embodiments, the pharmaceutical formulation comprises multiple multifunctional or multispecific molecules as described herein. In some embodiments, the multifunctional or multispecific molecules or the compositions as described herein is administered in combination with another drug or therapeutic agent.

### Treatment of Subjects

[0997] Any of the compositions provided herein may be administered to an individual. “Individual” may be used interchangeably with “subject” or “patient.” An individual may be a mammal, for example a human or animal such as a non-human primate, a rodent, a rabbit, a rat, a mouse, a horse, a donkey, a goat, a cat, a dog, a cow, a pig, or a sheep. In some embodiments, the individual is a human. In some embodiments, the individual is a fetus, an embryo, or a child. In other embodiments, the individual may be another eukaryotic organism, such as a plant. In some embodiments, the compositions provided herein are administered to a cell ex vivo.

[0998] In some embodiments, the compositions provided herein are administered to an individual as a method of treating a disease or disorder. In some embodiments, the individual has a genetic disease, such as any of the diseases described herein. In some embodiments, the individual is at risk of having a disease, such as any of the diseases described herein. In some embodiments, the individual is at increased risk of having a disease or disorder caused by insufficient amount of a protein or insufficient activity of a protein. If an individual is “at an increased risk” of having a disease or disorder caused insufficient amount of a protein or insufficient activity of a protein, the method involves preventative or prophylactic treatment. For example, an individual may be at an increased risk of having such a disease or disorder because of family history of the disease. Typically, individuals at an increased risk of having such a disease or disorder benefit from prophylactic treatment (e.g., by preventing or delaying the onset or progression of the disease or disorder). In some embodiments, a fetus is treated in utero, e.g., by administering the multifunctional or multispecific molecules or the compositions as described herein to the fetus directly or indirectly (e.g., via the mother).

[0999] Suitable routes for administration of the multifunctional or multispecific molecules or the compositions as described herein may vary depending on cell type to which delivery of the multifunctional or multispecific molecules or the compositions is desired. The multifunctional or multispecific molecules or the compositions as described herein may be administered to patients parenterally, for example, by intrathecal injection, intracerebroventricular injection, intraperitoneal injection, intramuscular injection, subcutaneous injection, or intravenous injection.

[1000] In some embodiments, the multifunctional or multispecific molecules or the compositions as described herein are administered with one or more agents capable of promoting penetration of the subject the multifunctional or multispecific molecules or the compositions as described herein across the blood-brain barrier by any method known in the art. For example, delivery of agents by administration of an adenovirus vector to motor neurons in muscle tissue is described in U.S. Pat. No. 6,632,427. “Adenoviral-vector-mediated gene transfer into medullary motor neurons,” incorporated herein by reference. Delivery of vectors directly to the brain, e.g., the striatum, the thalamus, the hippocampus, or the substantia nigra, is described, e.g., in U.S. Pat. No. 6,756,523, “Adenovirus vectors for the transfer of foreign genes into cells of the central nervous system particularly in brain,” incorporated herein by reference.

[1001] In some embodiments, the multifunctional or multispecific molecules or the compositions as described herein are linked or conjugated with agents that provide desirable pharmaceutical or pharmacodynamic properties. In some embodiments, the multifunctional or multispecific molecules or the compositions as described herein are coupled to a substance, known in the art to promote penetration or transport across the blood-brain barrier, e.g., an antibody to the transferrin receptor. In some embodiments, the multifunctional or multispecific molecules or the compositions as described herein are linked with a viral vector.

[1002] In some embodiments, subjects treated using the methods and compositions are evaluated for improvement in condition using any methods known and described in the art.

[1003] The terms “treat,” “treating”, and “treatment.” and the like are used herein to generally mean obtaining a desired pharmacological and/or physiological effect. The effect may be prophylactic in terms of preventing or partially preventing a disease, symptom or condition thereof and/or may be therapeutic in terms of a partial or complete cure of a disease, condition, symptom or adverse effect attributed to the disease. The term “treatment” as used herein covers any treatment of a disease in a mammal, particularly, a human, and includes. (a) preventing the disease from occurring in a subject which may be predisposed to the disease but has not yet been diagnosed as having it; (b) inhibiting the disease, i.e., arresting its development; or (c) relieving the disease, i.e., mitigating or ameliorating the disease and/or its symptoms or conditions. The term “prophylaxis” is used herein to refer to a measure or measures taken for the prevention or partial prevention of a disease or condition. In some embodiments, the terms “condition,” “disease.” or “disorder.” as used herein, are interchangeable.

[1004] By “treating or preventing a disease or a disorder” is meant ameliorating any of the conditions or signs or symptoms associated with the disorder before or after it has occurred. As compared with an equivalent untreated control, such reduction or degree of prevention is at least 3%, 5%, 10%, 20%, 40%, 50%, 60%, 80%, 90%, 95%, or 100% as measured by any standard technique A patient who is being treated for a disease or a disorder, is one who a medical practitioner has diagnosed as having such a condition. Diagnosis may be by any suitable means. Diagnosis and monitoring may involve, for example, detecting the presence of pathological cells in a biological sample (e.g., tissue biopsy, blood test, or urine test), detecting the level of a surrogate marker of the disorder in a biological sample, or detecting symptoms associated with the disorder. A patient in whom the development of a disorder is being prevented may or may not have received such a diagnosis. One in the art will understand that these patients may have been subjected to the same standard tests as described above or may have been identified, without examination, as one at high risk due to the presence of one or more risk factors (e.g., family history or genetic predisposition).

### Methods of Cancer Treatment

[1005] Described herein, in certain embodiments, is a method of treating a condition or disease in a subject in need therefor comprising administering to the subject a therapeutically effective amount of the multifunctional polypeptide molecule as described herein, the nucleic acid molecules as described herein, the vector as described herein, the cell as described herein, the pharmaceutical composition as described herein, or a combination thereof, wherein the administering is effective to treat the condition or disease in the subject.

[1006] In some embodiments, the condition or disease is cancer. In some embodiments, the cancer is a solid tumor, a hematological cancer, a metastatic cancer, a soft tissue tumor, or a combination thereof. In some embodiments, the cancer is the solid tumor, and wherein the solid tumor is selected from the group consisting of melanoma, pancreatic cancer, breast cancer, colorectal cancer, lung cancer, skin cancer, ovarian cancer, liver cancer, and a combination thereof. In some embodiments, the cancer is the hematological cancer, and wherein the hematological cancer is selected from the group consisting of Hodgkin's lymphoma. Non-Hodgkin's lymphoma, acute myeloid leukemia (AML), chronic myeloid leukemia, myelodysplastic syndrome, multiple myeloma. T-cell lymphoma, acute lymphocytic leukemia, and a combination thereof. In some embodiments, the Non-Hodgkin's lymphoma is selected from the group consisting of B cell lymphoma, diffuse large B cell lymphoma (DLBCL), follicular lymphoma, chronic lymphocytic leukemia (B-CLL), mantle cell lymphoma, marginal zone B-cell lymphoma. Burkitt lymphoma, lymphoplasmacytic lymphoma, hairy cell leukemia, and a combination thereof. In some embodiments, the T-cell lymphoma is peripheral T-cell lymphoma.

[1007] In some embodiments, the cancer is characterized by a cancer antigen present on the cancer. In some embodiments, the cancer antigen is a tumor antigen, a stromal antigen, or a hematological antigen. In some embodiments, the cancer antigen is selected from the group consisting of BCMA, CD19, CD20, CD22, DLL3. CLDN18.2, FcRH5, PDL1, CD47, gangloside 2 (GD2), prostate stem cell antigen (PSCA), prostate specific membrane antigen (PMSA), prostate-specific antigen (PSA), carcinoembryonic antigen (CEA), Ron Kinase, c-Met, Immature laminin receptor, TAG-72, BING-4, Calcium-activated chloride channel 2, Cyclin-B1, 9D7, Ep-CAM, EphA3, Her2/neu, Telomerase, SAP-1, Survivin, NY-ESO-1/LAGE-1, PRAME, SSX-2. Melan-A/MART-1, Gp100/pmel17, Tyrosinase, TRP-1/-2, MC1R, β-catenin, BRCA 1/2, CDK4, CML66, Fibronectin, p53, Ras, TGF-B receptor, AFP, ETA, MAGE, MUC-1, CA-125, BAGE, GAGE, NY-ESO-1, β-catenin. CDK4, CDC27, α actinin-4, TRP 1/gp75, TRP2, gp100, Melan-A/MARTI, gangliosides, WT1, EphA3, Epidermal growth factor receptor (EGFR), MART-2, MART-1, MUC1, MUC2, MUM1, MUM2, MUM3, NA88-1, NPM, OA1, OGT, RCC, RUI1, RUI2, SAGE, TRG, TRP1, TSTA, Folate receptor alpha, L1-CAM, CAIX, gpA33, GD3, GM2, VEGFR, Integrins, carbohydrates, IGF1R, EPHA3, TRAILR1, TRAILR2, RANKL, FAP, TGF-beta, hyaluronic acid, collagen, tenascin C, and tenascin W.

[1008] Methods described herein include treating a cancer in a subject by using multispecific or multifunctional molecules as described herein, e.g., using a pharmaceutical composition described herein. Also provided are methods for reducing or ameliorating a symptom of a cancer in a subject, as well as methods for inhibiting the growth of a cancer and/or killing one or more cancer cells. In some embodiments, the methods described herein decrease the size of a tumor and/or decrease the number of cancer cells in a subject administered with a described herein or a pharmaceutical composition described herein.

[1009] Described herein are methods of treating a subject having a cancer comprising acquiring a status of one or more TCRβV molecules in a subject. In some embodiments, a higher, e.g., increased, level or activity of one or more TCRβV molecules in a subject, e.g., in a sample from a subject, is indicative of a bias, e.g., a preferential expansion, e.g., clonal expansion, of T cells expressing said one or more TCRβV molecules in the subject.

[1010] Without wishing to be bound by theory, it is believed that a biased T cell population, e.g., a T cell population expressing a TCRβV molecule, is antigen-specific for a disease antigen, e.g., a cancer antigen (Wang C Y, et al., Int J Oncol. (2016) 48(6):2247-56). In some embodiments, the cancer antigen comprises a cancer associated antigen or a neoantigen. In some embodiments, a subject having a cancer, e.g., as described herein, has a higher, e.g., increased, level or activity of one or more TCRβV molecules associated with the cancer. In some embodiments, the TCRβV molecule is associated with, e.g., recognizes, a cancer antigen, e.g., a cancer associated antigen or a neoantigen.

[1011] Accordingly, as described herein are methods of expanding an immune effector cell population obtained from a subject, comprising acquiring a status of one or more TCRβV molecules in a sample from the subject, comprising contacting said immune effector cell population with an anti-TCRβV antibody molecule as described herein, e.g., an anti-TCRβV antibody molecule that binds to the same TCRβV molecule that is higher, e.g., increased in the immune effector cell population in the sample from the subject. In some embodiments, contacting the population of immune effector cells (e.g., comprising T cells that express one or more TCRβV molecules) with an anti-TCRβV molecule results in expansion of the population of immune effector cells expressing one or more TCRβV molecules. In some embodiments, the expanded population, or a portion thereof, is administered to the subject (e.g., same subject from whom the immune effector cell population was obtained), to treat the cancer. In some embodiments, the expanded population, or a portion thereof, is administered to a different subject (e.g., not the same subject from whom the immune effector cell population was obtained), to treat the cancer.

[1012] Also described herein are methods of treating a subject having a cancer, comprising: acquiring a status of one or more TCRβV molecules in a sample from the subject, and determining whether the one or more TCRβV molecules is higher, e.g., increased, in a sample from the subject compared to a reference value, wherein responsive to said determination, administering to the subject an effective amount of an anti-TCRβV antibody molecule, e.g., an agonistic anti-TCRβV antibody molecule, e.g., as described herein.

[1013] In some embodiments, the subject has B-CLL. In some embodiments, a subject having B-CLL has a higher, e.g., increased, level or activity of one or more TCRβV molecules, e.g., one or more TCRβV molecules comprising: (i) TCRβ V6 subfamily comprising, e.g., TCRβ V6-4*01, TCRβ V6-4*02, TCRβ V6-9*01, TCRβ V6-8*01, TCRβ V6-5*01, TCRβ V6-6*02, TCRβ V6-6*01, TCRβ V6-2*01, TCRβ V6-3*01 or TCRβ V6-1*01; (ii) TCRβ V5 subfamily comprising TCRβ V5-6*01, TCRβ V5-4*01, or TCRβ V5-8*01; (iii) TCRβ V3 subfamily comprising TCRβ V3-1*01; (iv) TCRβ V2 subfamily comprising TCRβ V2*01; or (v) TCRβ V19 subfamily comprising TCRβ V19*01, or TCRβ V19*02.

[1014] In some embodiments, a subject having B-CLL has a higher, e.g., increased, level or activity of a TCRβ V6 subfamily comprising, e.g., TCRβ V6-4*01, TCRβ V6-4*02, TCRβ V6-9*01, TCRβ V6-8*01, TCRβ V6-5*01, TCRβ V6-6*02, TCRβ V6-6*01, TCRβ V6-2*01, TCRβ V6-3*01 or TCRβ V6-1*01. In some embodiments, the subject is administered the multifunctional polypeptide molecule as described herein comprising an anti-TCRβV molecule (e.g., an agonistic anti-TCRβV molecule as described herein) that binds to one or more members of the TCRβ V6 subfamily. In some embodiments, administration of the multifunctional polypeptide molecule as described herein results in expansion of immune cells expressing one or more members of the TCRβ V6 subfamily.

[1015] In some embodiments, a subject having B-CLL has a higher, e.g., increased, level or activity of a TCRβ V5 subfamily comprising TCRβ V5-6*01, TCRβ V5-4*01, or TCRβ V5-8*01. In some embodiments, the subject is administered the multifunctional polypeptide molecule as described herein comprising an anti-TCRβV molecule (e.g., an agonistic anti-TCRβV molecule as described herein) that binds to one or more members of the TCRβ V5 subfamily. In some embodiments, administration of the multifunctional polypeptide molecule as described herein results in expansion of immune cells expressing one or more members of the TCRβ V5 subfamily.

[1016] In some embodiments, a subject having B-CLL has a higher, e.g., increased, level or activity of a TCRβ V3 subfamily comprising TCRβ V3-1*01. In some embodiments, the subject is administered the multifunctional polypeptide molecule as described herein comprising an anti-TCRβV molecule (e.g., an agonistic anti-TCRβV molecule as described herein) that binds to one or more members of the TCRβ V3 subfamily. In some embodiments, administration of the multifunctional polypeptide molecule as described herein results in expansion of immune cells expressing one or more members of the TCRβ V3 subfamily.

[1017] In some embodiments, a subject having B-CLL has a higher, e.g., increased, level or activity of a TCRβ V2 subfamily comprising TCRβ V2*01. In some embodiments, the subject is administered the multifunctional polypeptide molecule as described herein comprising an anti-TCRβV molecule (e.g., an agonistic anti-TCRβV molecule as described herein) that binds to one or more members of the TCRβ V2 subfamily. In some embodiments, administration of the multifunctional polypeptide molecule as described herein results in expansion of immune cells expressing one or more members of the TCRβ V2 subfamily.

[1018] In some embodiments, a subject having B-CLL has a higher, e.g., increased, level or activity of a TCRβ V19 subfamily comprising TCRβ V19*01, or TCRβ V19*02. In some embodiments, the subject is administered the multifunctional polypeptide molecule as described herein comprising an anti-TCRβV molecule (e.g., an agonistic anti-TCRβV molecule as described herein) that binds to one or more members of the TCRβ V19 subfamily. In some embodiments, administration of the multifunctional polypeptide molecule as described herein results in expansion of immune cells expressing one or more members of the TCRβ V19 subfamily.

[1019] In some embodiments, the subject has melanoma. In some embodiments, a subject having melanoma has a higher, e.g., increased, level or activity of one or more TCRβV molecules, e.g., one or more TCRβV molecules comprising the TCRβ V6 subfamily comprising, e.g., TCRβ V6-4*01, TCRβ V6-4*02, TCRβ V6-9*01, TCRβ V6-8*01, TCRβ V6-5*01, TCRβ V6-6*02, TCRβ V6-6*01, TCRβ V6-2*01, TCRβ V6-3*01 or TCRβ V6-1*01. In some embodiments, the subject is administered the multifunctional polypeptide molecule as described herein comprising an anti-TCRβV molecule (e.g., an agonistic anti-TCRβV molecule as described herein) that binds to one or more members of the TCRβ V6 subfamily. In some embodiments, administration of the multifunctional polypeptide molecule as described herein results in expansion of immune cells expressing one or more members of the TCRβ V6 subfamily.

[1020] In some embodiments, the subject has DLBCL (diffuse large B-cell lymphoma). In some embodiments, a subject having DLBCL has a higher, e.g., increased, level or activity of one or more TCRβV molecules, e.g., one or more TCRβV molecules comprising: (i) TCRβ V13 subfamily comprising TCRβ V13*01; (ii) TCRβ V3 subfamily comprising TCRβ V3-1*01; or (iii) TCRβ V23 subfamily.

[1021] In some embodiments, a subject having DLBCL has a higher, e.g., increased, level or activity of a TCRβ V13 subfamily comprising TCRβ V13*01. In some embodiments, the subject is administered the multifunctional polypeptide molecule as described herein comprising an anti-TCRβV molecule (e.g., an agonistic anti-TCRβV molecule as described herein) that binds to one or more members of the TCRβ V13 subfamily. In some embodiments, administration of the multifunctional polypeptide molecule as described herein results in expansion of immune cells expressing one or more members of the TCRβ V13 subfamily.

[1022] In some embodiments, a subject having DLBCL has a higher, e.g., increased, level or activity of a TCRβ V3 subfamily comprising TCRβ V3-1*01. In some embodiments, the subject is administered the multifunctional polypeptide molecule as described herein comprising an anti-TCRβV molecule (e.g., an agonistic anti-TCRβV molecule as described herein) that binds to one or more members of the TCRβ V3 subfamily. In some embodiments, administration of the multifunctional polypeptide molecule as described herein results in expansion of immune cells expressing one or more members of the TCRβ V3 subfamily.

[1023] In some embodiments, a subject having DLBCL has a higher, e.g., increased, level or activity of a TCRβ V23 subfamily. In some embodiments, the subject is administered the multifunctional polypeptide molecule as described herein comprising an anti-TCRβV molecule (e.g., an agonistic anti-TCRβV molecule as described herein) that binds to one or more members of the TCRβ V23 subfamily. In some embodiments, administration of the multifunctional polypeptide molecule as described herein results in expansion of immune cells expressing one or more members of the TCRβ V23 subfamily.

[1024] In some embodiments, the subject has CRC (colorectal cancer). In some embodiments, a subject having CRC has a higher, e.g., increased, level or activity of one or more TCRβV molecules, e.g., one or more TCRβV molecules comprising: (i) TCRβ V19 subfamily comprising TCRβ V19*01, or TCRβ V19*02; (ii) TCRβ V12 subfamily comprising TCRβ V12-4*01, TCRβ V12-3*01, or TCRβ V12-5*01; (iii) TCRβ V16 subfamily comprising TCRβ V16*01; or (iv) TCRβ V21 subfamily.

[1025] In some embodiments, a subject having CRC has a higher, e.g., increased, level or activity of a TCRβ V19 subfamily comprising TCRβ V19*01, or TCRβ V19*02. In some embodiments, the subject is administered the multifunctional polypeptide molecule as described herein comprising an anti-TCRβV molecule (e.g., an agonistic anti-TCRβV molecule as described herein) that binds to one or more members of the TCRβ V19 subfamily. In some embodiments, administration of the multifunctional polypeptide molecule as described herein results in expansion of immune cells expressing one or more members of the TCRβ V19 subfamily.

[1026] In some embodiments, a subject having CRC has a higher, e.g., increased, level or activity of a TCRβ V12 subfamily comprising TCRβ V12-4*01, TCRβ V12-3*01, or TCRβ V12-5*01. In some embodiments, the subject is administered the multifunctional polypeptide molecule as described herein comprising an anti-TCRβV molecule (e.g., an agonistic anti-TCRβV molecule as described herein) that binds to one or more members of the TCRβ V12 subfamily. In some embodiments, administration of the multifunctional polypeptide molecule as described herein results in expansion of immune cells expressing one or more members of the TCRβ V12 subfamily.

[1027] In some embodiments, a subject having CRC has a higher, e.g., increased, level or activity of a TCRβ V16 subfamily comprising TCRβ V16*01. In some embodiments, the subject is administered the multifunctional polypeptide molecule as described herein comprising an anti-TCRβV molecule (e.g., an agonistic anti-TCRβV molecule as described herein) that binds to one or more members of the TCRβ V16 subfamily. In some embodiments, administration of the multifunctional polypeptide molecule as described herein results in expansion of immune cells expressing one or more members of the TCRβ V16 subfamily.

[1028] In some embodiments, a subject having CRC has a higher, e.g., increased, level or activity of a TCRβ V21 subfamily. In some embodiments, the subject is administered the multifunctional polypeptide molecule as described herein comprising an anti-TCRβV molecule (e.g., an agonistic anti-TCRβV molecule as described herein) that binds to one or more members of the TCRβ V21 subfamily. In some embodiments, administration of the multifunctional polypeptide molecule as described herein results in expansion of immune cells expressing one or more members of the TCRβ V21 subfamily.

[1029] In some embodiments, acquiring a value for the status, e.g., presence, level and/or activity, of one or more TCRβV molecules comprises acquiring a measure of the T cell receptor (TCR) repertoire of a sample. In some embodiments, the value comprises a measure of the clonotype of a population of T cells in the sample.

[1030] In some embodiments, a value for the status of one or more TCRβV molecules is obtained, e.g., measured, using an assay described in Wang C Y, et al., Int J Oncol (2016) 48 (6): 2247-56, the entire contents of which are hereby incorporated by reference.

[1031] In some embodiments, a value for the status of one or more TCRβV molecules is obtained, e.g., measured, using flow cytometry.

### Combination Therapies

[1032] In some embodiments, the method as described herein further comprises administering a second therapeutic agent or therapy to the subject.

[1033] In some embodiments, the second therapeutic agent or therapy comprises a chemotherapeutic agent, a biologic agent, a hormonal therapy, radiation, or surgery.

[1034] In some embodiments, the second therapeutic agent or therapy is administered in combination with the multifunctional polypeptide molecule as described herein, the nucleic acid molecules as described herein, the vector as described herein, the cell as described herein, the pharmaceutical composition as described herein, sequentially, simultaneously, or concurrently.

[1035] The multispecific or multifunctional molecules as described herein can be used in combination with a second therapeutic agent or procedure.

[1036] In some embodiments, the multispecific or multifunctional molecules as described herein and the second therapeutic agent or procedure are administered/performed after a subject has been diagnosed with a cancer, e.g., before the cancer has been eliminated from the subject. In some embodiments, the multispecific or multifunctional molecules as described herein and the second therapeutic agent or procedure are administered/performed simultaneously or concurrently. For example, the delivery of one treatment is still occurring when the delivery of the second commences, e.g., there is an overlap in administration of the treatments. In other embodiments, the multispecific or multifunctional molecules as described herein and the second therapeutic agent or procedure are administered/performed sequentially. For example, the delivery of one treatment ceases before the delivery of the other treatment begins.

[1037] In some embodiments, combination therapy can lead to more effective treatment than monotherapy with either agent alone. In some embodiments, the combination of the first and second treatment is more effective (e.g., leads to a greater reduction in symptoms and/or cancer cells) than the first or second treatment alone. In some embodiments, the combination therapy permits use of a lower dose of the first or the second treatment compared to the dose of the first or second treatment normally required to achieve similar effects when administered as a monotherapy. In some embodiments, the combination therapy has a partially additive effect, wholly additive effect, or greater than additive effect.

[1038] In some embodiments, the anti-TCRβV antibody, multispecific or multifunctional molecule is administered in combination with a therapy, e.g., a cancer therapy (e.g, one or more of anti-cancer agents, immunotherapy, photodynamic therapy (PDT), surgery and/or radiation). The terms “chemotherapeutic.” “chemotherapeutic agent,” and “anti-cancer agent” are used interchangeably herein. The administration of the multispecific or multifunctional molecule and the therapy, e.g., the cancer therapy, can be sequential (with or without overlap) or simultaneous. Administration of the anti-TCRβV antibody, multispecific or multifunctional molecule can be continuous or intermittent during the course of therapy (e.g., cancer therapy). Certain therapies described herein can be used to treat cancers and non-cancerous diseases. For example, PDT efficacy can be enhanced in cancerous and non-cancerous conditions (e.g., tuberculosis) using the methods and compositions described herein (reviewed in, e.g., Agostinis, P, et al. (2011) CA Cancer J. Clin. 61.250-281).

[1039] Methods described herein include treating a cancer in a subject by using the multispecific or multifunctional molecules as described herein, e.g., using a pharmaceutical composition as described herein. Also provided are methods for reducing or ameliorating a symptom of a cancer in a subject, as well as methods for inhibiting the growth of a cancer and/or killing one or more cancer cells. In some embodiments, the methods described herein decrease the size of a tumor and/or decrease the number of cancer cells in a subject administered with a described herein or a pharmaceutical composition described herein.

[1040] In some embodiments, the cancer is a hematological cancer. In some embodiments, the hematological cancer is a leukemia or a lymphoma. As used herein, a “hematologic cancer” refers to a tumor of the hematopoietic or lymphoid tissues, e.g., a tumor that affects blood, bone marrow, or lymph nodes. Exemplary hematologic malignancies include, but are not limited to, leukemia (e.g., acute lymphoblastic leukemia (ALL), acute myeloid leukemia (AML), chronic lymphocytic leukemia (CLL), chronic myelogenous leukemia (CML), hairy cell leukemia, acute monocytic leukemia (AMoL), chronic myelomonocytic leukemia (CMML), juvenile myelomonocytic leukemia (JMML), or large granular lymphocytic leukemia), lymphoma (e.g., AIDS-related lymphoma, cutaneous T-cell lymphoma, Hodgkin lymphoma (e.g., classical Hodgkin lymphoma or nodular lymphocyte-predominant Hodgkin lymphoma), mycosis fungoides, non-Hodgkin lymphoma (e.g. B-cell non-Hodgkin lymphoma (e.g., Burkitt lymphoma, small lymphocytic lymphoma (CLL/SLL), diffuse large B-cell lymphoma, follicular lymphoma, immunoblastic large cell lymphoma, precursor B-lymphoblastic lymphoma, or mantle cell lymphoma) or T-cell non-Hodgkin lymphoma (mycosis fungoides, anaplastic large cell lymphoma, or precursor T-lymphoblastic lymphoma)), primary central nervous system lymphoma, Sezary syndrome, Waldenstrom macroglobulinemia), chronic myeloproliferative neoplasm, Langerhans cell histiocytosis, multiple myeloma/plasma cell neoplasm, myelodysplastic syndrome, or myelodysplastic/myeloproliferative neoplasm.

[1041] In some embodiments, the cancer is a myeloproliferative neoplasm, e.g., primary or idiopathic myelofibrosis (MF), essential thrombocytosis (ET), polycythemia vera (PV), or chronic myelogenous leukemia (CML). In some embodiments, the cancer is myelofibrosis. In some embodiments, the subject has myelofibrosis. In some embodiments, the subject has a calreticulin mutation, e.g., a calreticulin mutation as described herein. In some embodiments, the subject does not have the JAK2-V617F mutation. In some embodiments, the subject has the JAK2-V617F mutation. In some embodiments, the subject has a MPL mutation. In some embodiments, the subject does not have a MPL mutation.

[1042] In some embodiments, the cancer is a solid cancer. Exemplary solid cancers include, but are not limited to, ovarian cancer, rectal cancer, stomach cancer, testicular cancer, cancer of the anal region, uterine cancer, colon cancer, rectal cancer, renal-cell carcinoma, liver cancer, non-small cell carcinoma of the lung, cancer of the small intestine, cancer of the esophagus, melanoma, Kaposi's sarcoma, cancer of the endocrine system, cancer of the thyroid gland, cancer of the parathyroid gland, cancer of the adrenal gland, bone cancer, pancreatic cancer, skin cancer, cancer of the head or neck, cutaneous or intraocular malignant melanoma, uterine cancer, brain stem glioma, pituitary adenoma, epidermoid cancer, carcinoma of the cervix squamous cell cancer, carcinoma of the fallopian tubes, carcinoma of the endometrium, carcinoma of the vagina, sarcoma of soft tissue, cancer of the urethra, carcinoma of the vulva, cancer of the penis, cancer of the bladder, cancer of the kidney or ureter, carcinoma of the renal pelvis, spinal axis tumor, neoplasm of the central nervous system (CNS), primary CNS lymphoma, tumor angiogenesis, metastatic lesions of said cancers, or combinations thereof.

[1043] In some embodiments, the cancer is acute lymphoblastic leukemia, acute lymphocytic leukemia, acute myelogenous leukemia, aplastic anemia, chronic myelogenous leukemia, desmoplastic small round cell tumor, Ewing's sarcoma, Hodgkin's disease, multiple myeloma, myelodysplasia, Non-Hodgkin's lymphoma, paroxysmal nocturnal hemoglobinuria, radiation poisoning, chronic lymphocytic leukemia. AL amyloidosis, essential thrombocytosis, polycythemia vera, severe aplastic anemia, neuroblastoma, breast tumors, ovarian tumors, renal cell carcinoma, autoimmune disorders, such as systemic sclerosis, osteopetrosis, inherited metabolic disorders, juvenile chronic arthritis, adrenoleukodystrophy, amegakaryocytic thrombocytopenia, sickle cell disease, severe congenital immunodeficiency. Griscelli syndrome type II, Hurler syndrome, Kostmann syndrome, Krabbe disease, metachromatic leukodystrophy, thalassemia, hemophagocytic lymphohistiocytosis, and Wiskott-Aldrich syndrome, leukemias, lymphomas, melanomas, neuroendocrine tumors, carcinomas and sarcomas. Exemplary cancers that may be treated with a compound, pharmaceutical composition, or method provided herein include lymphoma, sarcoma, bladder cancer, bone cancer, brain tumor, cervical cancer, colon cancer, esophageal cancer, gastric cancer, head and neck cancer, kidney cancer, myeloma, thyroid cancer, leukemia, prostate cancer, breast cancer (e.g. triple negative, ER positive, ER negative, chemotherapy resistant, herceptin resistant, HER2 positive, doxorubicin resistant, tamoxifen resistant, ductal carcinoma, lobular carcinoma, primary, metastatic), ovarian cancer, pancreatic cancer, liver cancer (e.g., hepatocellular carcinoma), lung cancer (e.g. non-small cell lung carcinoma, squamous cell lung carcinoma, adenocarcinoma, large cell lung carcinoma, small cell lung carcinoma, carcinoid, sarcoma), glioblastoma multiforme, glioma, melanoma, prostate cancer, castration-resistant prostate cancer, breast cancer, triple negative breast cancer, glioblastoma, ovarian cancer, lung cancer, squamous cell carcinoma (e.g., head, neck, or esophagus), colorectal cancer, leukemia, acute myeloid leukemia, lymphoma, B cell lymphoma, or multiple myeloma. Additional examples include, cancer of the thyroid, endocrine system, brain, breast, cervix, colon, head & neck, esophagus, liver, kidney, lung, non-small cell lung, melanoma, mesothelioma, ovary, sarcoma, stomach, uterus or Medulloblastoma. Hodgkin's Disease, Non-Hodgkin's Lymphoma, multiple myeloma, neuroblastoma, glioma, glioblastoma multiforme, ovarian cancer, rhabdomyosarcoma, primary thrombocytosis, primary macroglobulinemia, primary brain tumors, cancer, malignant pancreatic insulanoma, malignant carcinoid, urinary bladder cancer, premalignant skin lesions, testicular cancer, lymphomas, thyroid cancer, neuroblastoma, esophageal cancer, genitourinary tract cancer, malignant hypercalcemia, endometrial cancer, adrenal cortical cancer, neoplasms of the endocrine or exocrine pancreas, medullary thyroid cancer, medullary thyroid carcinoma, melanoma, colorectal cancer, papillary thyroid cancer, hepatocellular carcinoma. Paget's Disease of the Nipple, Phyllodes Tumors, Lobular Carcinoma, Ductal Carcinoma, cancer of the pancreatic stellate cells, cancer of the hepatic stellate cells, or prostate cancer. In some embodiments, the cancer is a solid tumor. In some embodiments, the cancer is hematological.

[1044] In some embodiments, the multispecific or multifunctional molecules as described herein (or pharmaceutical composition as described herein) are administered in a manner appropriate to the disease to be treated or prevented. The quantity and frequency of administration will be determined by such factors as the condition of the patient, and the type and severity of the patient's disease. Appropriate dosages may be determined by clinical trials. For example, when “an effective amount” or “a therapeutic amount” is indicated, the precise amount of the pharmaceutical composition (or multispecific or multifunctional molecules) to be administered can be determined by a physician with consideration of individual differences in tumor size, extent of infection or metastasis, age, weight, and condition of the subject. In some embodiments, the pharmaceutical composition described herein can be administered at a dosage of 10⁴ to 10⁹ cells/kg body weight, e.g., 10⁵ to 10⁶ cells/kg body weight, including all integer values within those ranges. In some embodiments, the pharmaceutical composition described herein can be administered multiple times at these dosages. In some embodiments, the pharmaceutical composition described herein can be administered using infusion techniques described in immunotherapy (see, e.g. Rosenberg et al., New Eng. J, of Med. 319:1676, 1988).

[1045] In some embodiments, the multispecific or multifunctional molecules as described herein or the pharmaceutical composition as described herein is administered to the subject parentally. In some embodiments, the cells are administered to the subject intravenously, subcutaneously, intratumorally, intranodally, intramuscularly, intradermally, or intraperitoneally. In some embodiments, the cells are administered, e.g., injected, directly into a tumor or lymph node. In some embodiments, the cells are administered as an infusion (e.g., as described in Rosenberg et al., New Eng. J, of Med. 319:1676, 1988) or an intravenous push. In some embodiments, the cells are administered as an injectable depot formulation.

[1046] In some embodiments, the subject is a mammal. In some embodiments, the subject is a human, monkey, pig, dog, cat, cow, sheep, goat, rabbit, rat, or mouse. In some embodiments, the subject is a human. In some embodiments, the subject is a pediatric subject, e.g., less than 18 years of age, e.g., less than 17, 16, 15, 14, 13, 12, 11, 10, 9, 8, 7, 6, 5, 4, 3, 2, 1 or less years of age. In some embodiments, the subject is an adult, e.g., at least 18 years of age, e.g., at least 19, 20, 21, 22, 23, 24, 25, 25-30, 30-35, 35-40, 40-50, 50-60, 60-70, 70-80, or 80-90 years of age.

### Anti-Cancer Therapies

[1047] In other embodiments, the multispecific or multifunctional molecules as described herein is administered in combination with a low or small molecular weight chemotherapeutic agent Exemplary low or small molecular weight chemotherapeutic agents include, but not limited to, 13-cis-retinoic acid (isotretinoin. ACCUTANE®), 2-CdA (2-chlorodeoxyadenosine, cladribine, LEUSTATIN™), 5-azacitidine (azacitidine. VIDAZA®), 5-fluorouracil (5-FU, fluorouracil, ADRUCIL®), 6-mercaptopurine (6-MP, mercaptopurine, PURINETHOL®), 6-TG (6-thioguanine, thioguanine, THIOGUANINE TABLOID®), abraxane (paclitaxel protein-bound), actinomycin-D (dactinomyein, COSMEGEN®), alitretinoin (PANRETIN®), all-transretinoic acid (ATRA, tretinoin, VESANOID®), altretamine (hexamethylmelamine, HMM, HEXALEN®), amethopterin (methotrexate, methotrexate sodium, MTX, TREXALL™, RHEUMATREX®), amifostine (ETHYOL®), arabinosylcytosine (Ara-C, cytarabine, CYTOSAR-U®), arsenic trioxide (TRISENOX®), asparaginase (Erwinia L-asparaginase, L-asparaginase, ELSPAR®, KIDROLASE®), BCNU (carmustine, BICNU®), bendamustine (TREANDA®), bexarotene (TARGRETIN®), bleomycin (BLENOXANE®), busulfan (BUSULFEX®, MYLERAN®), calcium leucovorin (Citrovorum Factor, folinic acid, leucovorin), camptothecin-11 (CPT-11, irinotecan, CAMPTOSAR®), capecitabine (XELODA®), carboplatin (PARAPLATIN®), carmustine wafer (prolifeprospan 20 with carmustine implant, GLIADEL® wafer), CCI-779 (temsirolimus, TORISEL®), CCNU (lomustine, CeeNU), CDDP (cisplatin, PLATINOL®, PLATINOL-AQ®), chlorambucil (leukeran), cyclophosphamide (CYTOXANR, NEOSAR®), dacarbazine (DIC, DTIC, imidazole carboxamide, DTIC-DOME®), daunomycin (daunorubicin, daunorubicin hydrochloride, rubidomycin hydrochloride, CERUBIDINE®), decitabine (DACOGEN®), dexrazoxane (ZINECARD®), DHAD (mitoxantrone, NOVANTRONE®), docetaxel (TAXOTERE®), doxorubicin (ADRIAMYCIN®, RUBEX®), epirubicin (ELLENCE™), estramustine (EMCYT®), etoposide (VP-16, etoposide phosphate, TOPOSAR®, VEPESID®, ETOPOPHOS®), floxuridine (FUDR®), fludarabine (FLUDARA®), fluorouracil (cream) (CARAC™, EFUDEX®, FLUOROPLEX®), gemcitabine (GEMZAR®), hydroxyurea (HYDREA®, DROXIA™, MYLOCEL™), idarubicin (IDAMYCIN®), ifosfamide (IFEX®), ixabepilone (IXEMPRA™), LCR (leurocristine, vincristine, VCR, ONCOVIN®, VINCASAR PFS®), L-PAM (L-sarcolysin, melphalan, phenylalanine mustard, ALKERAN®), mechlorethamine (mechlorethamine hydrochloride, mustine, nitrogen mustard. MUSTARGEN®), mesna (MESNEX™), mitomycin (mitomycin-C, MTC, MUTAMYCIN®), nelarabine (ARRANON®), oxaliplatin (ELOXATIN™), paclitaxel (TAXOL®, ONXAL™), pegaspargase (PEG-L-asparaginase, ONCOSPAR®), PEMETREXED (ALIMTA®), pentostatin (NIPENT®), procarbazine (MATULANE®), streptozocin (ZANOSAR®), temozolomide (TEMODAR®), teniposide (VM-26, VUMON®), TESPA (thiophosphoamide, thiotepa, TSPA, THIOPLEX®), topotecan (HYCAMTIN®), vinblastine (vinblastine sulfate, vincaleukoblastine, VLB, ALKABAN-AQ®, VELBAN®), vinorelbine (vinorelbine tartrate, NAVELBINE®), and vorinostat (ZOLINZA®).

[1048] In another embodiment, the multispecific or multifunctional molecules as described herein is administered in conjunction with a biologic. Biologics useful in the treatment of cancers are known in the art and a binding molecule as described herein may be administered, for example, in conjunction with such known biologics. For example, the FDA has approved the following biologics for the treatment of breast cancer: HERCEPTIN® (trastuzumab. Genentech Inc., South San Francisco, Calif.; a humanized monoclonal antibody that has anti-tumor activity in HER2-positive breast cancer); FASLODEX® (fulvestrant, AstraZeneca Pharmaceuticals. LP, Wilmington. Del.; an estrogen-receptor antagonist used to treat breast cancer): ARIMIDEX® (anastrozole, AstraZeneca Pharmaceuticals, LP: a nonsteroidal aromatase inhibitor which blocks aromatase, an enzyme needed to make estrogen): Aromasin® (exemestane, Pfizer Inc., New York, N.Y.; an irreversible, steroidal aromatase inactivator used in the treatment of breast cancer); FEMARA® (lctrozole. Novartis Pharmaceuticals, East Hanover, N.J.; a nonsteroidal aromatase inhibitor approved by the FDA to treat breast cancer); and NOLVADEX® (tamoxifen, AstraZeneca Pharmaceuticals, LP; a nonsteroidal antiestrogen approved by the FDA to treat breast cancer). Other biologics with which the binding molecules as described herein may be combined include: AVASTIN® (bevacizumab. Genentech Inc.; the first FDA-approved therapy designed to inhibit angiogenesis); and ZEVALIN® (ibritumomab tiuxetan, Biogen Idec. Cambridge, Mass.: a radiolabeled monoclonal antibody currently approved for the treatment of B-cell lymphomas).

[1049] In addition, the FDA has approved the following biologics for the treatment of colorectal cancer; AVASTIN®; ERBITUX® (cetuximab, ImClone Systems Inc., New York, N.Y., and Bristol-Myers Squibb, New York, N.Y.; is a monoclonal antibody directed against the epidermal growth factor receptor (EGFR)); GLEEVEC® (imatinib mesylate: a protein kinase inhibitor); and ERGAMISOL® (levamisole hydrochloride, Janssen Pharmaceutica Products, LP, Titusville, N.J.; an immunomodulator approved by the FDA in 1990 as an adjuvant treatment in combination with 5-fluorouracil after surgical resection in patients with Dukes' Stage C colon cancer).

[1050] For the treatment of lung cancer, exemplary biologics include TARCEVA® (erlotinib HCL, OSI Pharmaceuticals Inc., Melville, N.Y.: a small molecule designed to target the human epidermal growth factor receptor 1 (HER1) pathway).

[1051] For the treatment of multiple myeloma, exemplary biologics include VELCADE® (bortezomib, Millennium Pharmaceuticals, Cambridge Mass.: a proteasome inhibitor). Additional biologics include THALIDOMID® (thalidomide, Clegene Corporation, Warren, N.J.; an immunomodulatory agent and appears to have multiple actions, including the ability to inhibit the growth and survival of myeloma cells and anti-angiogenesis).

[1052] Additional exemplary cancer therapeutic antibodies include, but are not limited to, 3F8, abagovomab, adecatumumab, afutuzumab, alacizumab pegol, alemtuzumab (CAMPATH®, MABCAMPATH®), altumomab pentetate (HYBRI-CEAKER®), anatumomab mafenatox, anrukinzumab (IMA-638), apolizumab, arcitumomab (CEA-SCAN®), bavituximab, bectumomab (LYMPHOSCAN®), belimumab (BENLYSTA®, LYMPHOSTAT-B®), besilesomab (SCINTIMUN®), bevacizumab (AVASTIN®), bivatuzumab mertansine, blinatumomab, brentuximab vedotin, cantuzumab mertansine, capromab pendetide (PROSTASCINT®), catumaxomab (REMOVAB®), CC49, cetuximab (C225, ERBITUX®), citatuzumab bogatox, cixutumumab, clivatuzumab tetraxetan, conatumumab, dacetuzumab, denosumab (PROLIA®), detumomab, ecromeximab, edrecolomab (PANOREX®), elotuzumab, epitumomab cituxetan, epratuzumab, ertumaxomab (REXOMUN®), etaracizumab, farletuzumab, figitumumab, fresolimumab, galiximab, gemtuzumab ozogamicin (MYLOTARG®), girentuximab, glembatumumab vedotin, ibritumomab (ibritumomab tiuxetan. ZEVALIN®), igovomab (INDIMACIS-125®), intetumumab, inotuzumab ozogamicin, ipilimumab, iratumumab, labetuzumab (CEA-CIDE®), lexatumumab, lintuzumab, lucatumumab, lumiliximab, mapatumumab, matuzumab, milatuzumab, minretumomab, mitumomab, nacolomab tafenatox, naptumomab estafenatox, necitumumab, nimotuzumab (THERACIM®, THERALOC®), nofetumomab merpentan (VERLUMA®), ofatumumab (ARZERRA®), olaratumab, oportuzumab monatox, oregovomab (OVAREX®), panitumumab (VECTIBIX®), pemtumomab (THERAGYN®), pertuzumab (OMNITARG®), pintumomab, pritumumab, ramucirumab, ranibizumab (LUCENTIS®), rilotumumab, rituximab (MABTHERA®), RITUXAN®), robatumumab, satumomab pendetide, sibrotuzumab, siltuximab, sontuzumab, tacatuzumab tetraxetan (AFP-CIDER), taplitumomab paptox, tenatumomab, TGN1412, ticilimumab (tremelimumab), tigatuzumab, TNX-650, tositumomab (BEXXAR®), trastuzumab (HERCEPTIN®), tremelimumab, tucotuzumab celmoleukin, veltuzumab, volociximab, votumumab (HUMASPECT®), zalutumumab (HUMAX-EGFR®), and zanolimumab (HUMAX-CD4®).

[1053] In some embodiments, the multispecific or multifunctional molecules as described herein are administered in combination with a viral cancer therapeutic agent. Exemplary viral cancer therapeutic agents include, but not limited to, vaccinia virus (vvDD-CDSR), carcinoembryonic antigen-expressing measles virus, recombinant vaccinia virus (TK-deletion plus GM-CSF), Seneca Valley virus-001. Newcastle virus, coxsackie virus A21, GL-ONC1, EBNA1 C-terminal/LMP2 chimeric protein-expressing recombinant modified vaccinia Ankara vaccine, carcinoembryonic antigen-expressing measles virus, G207 oncolytic virus, modified vaccinia virus Ankara vaccine expressing p53, OncoVEX GM-CSF modified herpes-simplex 1 virus, fowlpox virus vaccine vector, recombinant vaccinia prostate-specific antigen vaccine, human papillomavirus 16/18 L1 virus-like particle/AS04 vaccine. MVA-EBNA1/LMP2 Inj, vaccine, quadrivalent HPV vaccine, quadrivalent human papillomavirus (types 6, 11, 16, 18) recombinant vaccine (GARDASIL®), recombinant fowlpox-CEA(6D)/TRICOM vaccine: recombinant vaccinia-CEA (6D)-TRICOM vaccine, recombinant modified vaccinia Ankara-5T4 vaccine, recombinant fowlpox-TRICOM vaccine, oncolytic herpes virus NV1020, HPV L1 VLP vaccine V504, human papillomavirus bivalent (types 16 and 18) vaccine (CERVARIX®), herpes simplex virus HF10, Ad5CMV-p53 gene, recombinant vaccinia DF3/MUC1 vaccine, recombinant vaccinia-MUC-1 vaccine, recombinant vaccinia-TRICOM vaccine, ALVAC MART-1 vaccine, replication-defective herpes simplex virus type I (HSV-1) vector expressing human Preproenkephalin (NP2), wild-type reovirus, reovirus type 3 Dearing (REOLYSIN®), oncolytic virus HSV1716, recombinant modified vaccinia Ankara (MVA)-based vaccine encoding Epstein-Barr virus target antigens, recombinant fowlpox-prostate specific antigen vaccine, recombinant vaccinia prostate-specific antigen vaccine, recombinant vaccinia-B7.1 vaccine, rAd-p53 gene, Ad5-delta24RGD, HPV vaccine 580299, JX-594 (thymidine kinase-deleted vaccinia virus plus GM-CSF), HPV-16/18 L1/AS04, fowlpox virus vaccine vector, vaccinia-tyrosinase vaccine, MEDI-517 HPV-16/18 VLP AS04 vaccine, adenoviral vector containing the thymidine kinase of herpes simplex virus TK99UN. HspE7. FP253/Fludarabine, ALVAC (2) melanoma multi-antigen therapeutic vaccine, ALVAC-hB7.1, canarypox-hIL-12 melanoma vaccine, Ad-REIC/Dkk-3, rAd-IFN SCH 721015, TIL-Ad-INFg, Ad-ISF35, and coxsackievirus A21 (CVA21, CAVATAK®).

[1054] In some embodiments, the multispecific or multifunctional molecules as described herein are administered in combination with a nanopharmaceutical. Exemplary cancer nanopharmaceuticals include, but not limited to, ABRAXANE® (paclitaxel bound albumin nanoparticles), CRLX101 (CPT conjugated to a linear cyclodextrin-based polymer), CRLX288 (conjugating docetaxel to the biodegradable polymer poly (lactic-co-glycolic acid)), cytarabine liposomal (liposomal Ara-C, DEPOCYT™), daunorubicin liposomal (DAUNOXOME®), doxorubicin liposomal (DOXIL®, CAELYX®), encapsulated-daunorubicin citrate liposome (DAUNOXOME®), and PEG anti-VEGF aptamer (MACUGEN®).

[1055] In some embodiments, the multispecific or multifunctional molecules as described herein are administered in combination with paclitaxel or a paclitaxel formulation, e.g., TAXOL R, protein-bound paclitaxel (e.g. ABRAXANE®). Exemplary paclitaxel formulations include, but are not limited to, nanoparticle albumin-bound paclitaxel (ABRAXANE®, marketed by Abravis Bioscience), docosahexaenoic acid bound-paclitaxel (DHA-paclitaxel, Taxoprexin, marketed by Protarga), polyglutamate bound-paclitaxel (PG-paclitaxel, paclitaxel poliglumex, CT-2103, XYOTAX, marketed by Cell Therapeutic), the tumor-activated prodrug (TAP), ANG105 (Angiopep-2 bound to three molecules of paclitaxel, marketed by ImmunoGen), paclitaxel-EC-1 (paclitaxel bound to the erbB2-recognizing peptide EC-1; see Li et al., Biopolymers (2007) 87:225-230), and glucose-conjugated paclitaxel (e.g., 2′-paclitaxel methyl 2-glucopyranosyl succinate, see Liu et al., Bioorganic & Medicinal Chemistry Letters (2007) 17:617-620).

[1056] Exemplary RNAi and antisense RNA agents for treating cancer include, but not limited to, CALAA-01, siG12D LODER (Local Drug Elute®), and ALN-VSP02.

[1057] Other cancer therapeutic agents include, but not limited to, cytokines (e.g., aldesleukin (IL-2, Interleukin-2, PROLEUKIN®), alpha Interferon (IFN-alpha, Interferon alfa, INTRON® A (Interferon alfa-2b). ROFERON-A® (Interferon alfa-2a)), Epoetin alfa (PROCRIT®), filgrastim (G-CSF, Granulocyte-Colony Stimulating Factor, NEUPOGEN®), GM-CSF (Granulocyte Macrophage Colony Stimulating Factor, sargramostim, LEUKINE™), IL-11 (Interleukin-11, oprelvekin, NEUMEGA®). Interferon alfa-2b (PEG conjugate) (PEG interferon, PEG-INTRON™), and pegfilgrastim (NEULASTA™)), hormone therapy agents (e.g., aminoglutethimide (CYTADREN®), anastrozole (ARIMIDEX®), bicalutamide (CASODEX®), exemestane (AROMASIN®), fluoxymesterone (HALOTESTIN®), flutamide (EULEXIN®), fulvestrant (FASLODEX®), goserelin (ZOLADEX®), letrozole (FEMARA®), Jeuprolide (ELIGARD™, LUPRON®, LUPRON DEPOT®, VIADUR™), megestrol (megestrol acetate, MEGACE®), nilutamide (ANANDRON®, NILANDRON®), octreotide (octreotide acetate, SANDOSTATIN®, SANDOSTATIN LAR®), raloxifene (EVISTA®), romiplostim (NPLATE®), tamoxifen (NOVALDEX®), and toremifene (FARESTON®)), phospholipase A2 inhibitors (e.g., anagrelide (AGRYLIN®)), biologic response modifiers (e.g. BCG (THERACYS®, TICE®), and Darbepoetin alfa (ARANESP®)), target therapy agents (e.g., bortezomib (VELCADE®), dasatinib (SPRYCEL™), denileukin diftitox (ONTAK®), erlotinib (TARCEVA®), everolimus (AFINITOR®), gefitinib (IRESSA®), imatinib mesylate (STI-571, GLEEVEC™), lapatinib (TYKERB®), sorafenib (NEXAVAR®), and SU11248 (sunitinib, SUTENT®)), immunomodulatory and antiangiogenic agents (e.g., CC-5013 (lenalidomide, REVLIMID®), and thalidomide (THALOMID®)), glucocorticosteroids (e.g., cortisone (hydrocortisone, hydrocortisone sodium phosphate, hydrocortisone sodium succinate. ALA-CORT®, HYDROCORT ACETATE®, hydrocortone phosphate LANACORT®, SOLU-CORTEF®), decadron (dexamethasone, dexamethasone acetate, dexamethasone sodium phosphate, DEXASONE®, DIODEX®, HEXADROL®, MAXIDEX®), methylprednisolone (6-methylprednisolone, methylprednisolone acetate, methylprednisolone sodium succinate, DURALONE®, MEDRALONE®, MEDROL®, M-PREDNISOL®. SOLU-MEDROL®), prednisolone (DELTA-CORTEF®, ORAPRED®, PEDIAPRED®, PRELONE®), and prednisone (DELTASONE®, LIQUID PRED®, METICORTEN®, ORASONE®)), and bisphosphonates (e.g., pamidronate (AREDIA®), and zoledronic acid (ZOMETA®)).

[1058] In some embodiments, the multispecific or multifunctional molecules as described herein are used in combination with a tyrosine kinase inhibitor (e.g., a receptor tyrosine kinase (RTK) inhibitor). Exemplary tyrosine kinase inhibitor include, but are not limited to, an epidermal growth factor (EGF) pathway inhibitor (e.g., an epidermal growth factor receptor (EGFR) inhibitor), a vascular endothelial growth factor (VEGF) pathway inhibitor (e.g., an antibody against VEGF, a VEGF trap, a vascular endothelial growth factor receptor (VEGFR) inhibitor (e.g., a VEGFR-1 inhibitor, a VEGFR-2 inhibitor, a VEGFR-3 inhibitor)), a platelet derived growth factor (PDGF) pathway inhibitor (e.g., a platelet derived growth factor receptor (PDGFR) inhibitor (e.g., a PDGFR-β inhibitor)), a RAF-1 inhibitor, a KIT inhibitor and a RET inhibitor. In some embodiments, the anti-cancer agent used in combination with the AHCM agent is selected from the group consisting of: axitinib (AG013736), bosutinib (SKI-606), cediranib (RECENTIN™, AZD2171), dasatinib (SPRYCEL®, BMS-354825), erlotinib (TARCEVA®), gefitinib (IRESSA®), imatinib (Gleevec®) CGP57148B, STI-571), lapatinib (TYKERBR_TYVERBR), lestaurtinib (CEP-701), neratinib (HKI-272), nilotinib (TASIGNA®), semavanib (scmaxinib, SU5416), sunitinib (SUTENT®, SUI 1248), toceranib (PALLADIA®), vandetanib (ZACTIMA®, ZD6474), vatalanib (PTK787, PTK/ZK), trastuzumab (HERCEPTIN®), bevacizumab (AVASTIN®), rituximab (RITUXAN®), cetuximab (ERBITUX®), panitumumab (VECTIBIX®), ranibizumab (Lucentis®), nilotinib (TASIGNA®), sorafenib (NEXAVAR®), alemtuzumab (CAMPATH®), gemtuzumab ozogamicin (MYLOTARG®), ENMD-2076, PCI-32765, AC220, dovitinib lactate (TKI258, CHIR-258), BIBW 2992 (TOVOK™), SGX523, PF-04217903, PF-02341066, PF-299804, BMS-777607, ABT-869, MP470, BIBF 1120 (VARGATEF®), AP24534, JNJ-26483327, MGCD265, DCC-2036, BMS-690154, CEP-11981, tivozanib (AV-951), OSI-930, MM-121, XL-184, XL-647. XL228, AEE788. AG-490, AST-6, BMS-599626, CUDC-101, PD153035, pelitinib (EKB-569), vandetanib (zactima), WZ3146, WZ4002, WZ8040, ABT-869 (linifanib), AEE788, AP24534 (ponatinib), AV-951 (tivozanib), axitinib, BAY 73-4506 (regorafenib), brivanib alaninate (BMS-582664), brivanib (BMS-540215), cediranib (AZD2171), CHIR-258 (dovitinib), CP 673451, CYC116, E7080, Ki8751, masitinib (AB1010), MGCD-265, motesanib diphosphate (AMG-706), MP-470, OSI-930, Pazopanib Hydrochloride, PD173074, Sorafenib Tosylate (Bay 43-9006), SU 5402, TSU-68 (SU6668), vatalanib, XL880 (GSK1363089, EXEL-2880). Selected tyrosine kinase inhibitors are chosen from sunitinib, erlotinib, gefitinib, or sorafenib. In some embodiments, the tyrosine kinase inhibitor is sunitinib.

[1059] In some embodiments, the multispecific or multifunctional molecules as described herein are administered in combination with one of more of an anti-angiogenic agent, or a vascular targeting agent or a vascular disrupting agent. Exemplary anti-angiogenic agents include, but are not limited to, VEGF inhibitors (e.g., anti-VEGF antibodies (e.g., bevacizumab). VEGF receptor inhibitors (e.g., itraconazole), inhibitors of cell proliferatin and/or migration of endothelial cells (e.g. carboxy amidotriazole, TNP-470); inhibitors of angiogenesis stimulators (e.g., suramin), among others. A vascular-targeting agent (VTA) or vascular disrupting agent (VDA) is designed to damage the vasculature (blood vessels) of cancer tumors causing central necrosis (reviewed in, e.g., Thorpe. P. E. (2004) Clin. Cancer Res. Vol. 10:415-427). VTAs can be small-molecule. Exemplary small-molecule VTAs include, but are not limited to, microtubule destabilizing drugs (e.g., combretastatin A-4 disodium phosphate (CA4P), ZD6126, AVE8062, Oxi 4503); and vadimezan (ASA404).

### Immune Checkpoint Inhibitors

[1060] In other embodiments, methods described herein comprise use of an immune checkpoint inhibitor in combination with the multispecific or multifunctional molecules as described herein. The methods can be used in a therapeutic protocol in vivo.

[1061] In some embodiments, an immune checkpoint inhibitor inhibits a checkpoint molecule. Exemplary checkpoint molecules include but are not limited to CTLA4, PD1, PD-L1, PD-L2, TIM3, LAG3, CD160, 2B4, CD80, CD86, B7-H3 (CD276), B7-H4 (VTCN1), HVEM (TNFRSF14 or CD270), BTLA, KIR, MHC class I, MHC class II, GAL9, VISTA, BTLA, TIGIT, LAIR1, and A2aR. See, e.g., Pardoll. Nat. Rev. Cancer 12.4 (2012): 252-64, incorporated herein by reference.

[1062] In some embodiments, the immune checkpoint inhibitor is a PD-1 inhibitor, e.g., an anti-PD-1 antibody such as Nivolumab, Pembrolizumab or Pidilizumab. Nivolumab (also called MDX-1106, MDX-1106-04. ONO-4538, or BMS-936558) is a fully human IgG4 monoclonal antibody that specifically inhibits PD1. See, e.g., U.S. Pat. No. 8,008,449 and WO2006/121168. Pembrolizumab (also called Lambrolizumab, MK-3475, MK03475. SCH-900475 or KEYTRUDA®; Merck) is a humanized IgG4 monoclonal antibody that binds to PD-1. See, e.g. Hamid, O, et al. (2013) New England Journal of Medicine 369 (2): 134-44. U.S. Pat. No. 8,354,509 and WO2009/114335 Pidilizumab (also called CT-011 or Cure Tech) is a humanized IgG1k monoclonal antibody that binds to PD1. See, e.g., WO2009/101611. In some embodiments, the inhibitor of PD-1 is an antibody molecule having a sequence substantially identical or similar thereto, e.g., a sequence at least 85%, 90%, 95% identical or higher to the sequence of Nivolumab, Pembrolizumab or Pidilizumab. Additional anti-PD1 antibodies, e.g., AMP 514 (Amplimmune), are described, e.g., in U.S. Pat. No. 8,609,089, US2010028330, and/or US20120114649.

[1063] In some embodiments, the PD-1 inhibitor is an immunoadhesin, e.g., an immunoadhesin comprising an extracellular/PD-1 binding portion of a PD-1 ligand (e.g. PD-L1 or PD-L2) that is fused to a constant region (e.g., an Fc region of an immunoglobulin). In some embodiments, the PD-1 inhibitor is AMP-224 (B7-DCIg, e.g., described in WO2011/066342 and WO2010/027827), a PD-L2 Fc fusion soluble receptor that blocks the interaction between B7-H1 and PD-1.

[1064] In some embodiments, the immune checkpoint inhibitor is a PD-L1 inhibitor, e.g., an antibody molecule. In some embodiments, the PD-L1 inhibitor is YW243.55.S70, MPDL3280A, MEDI-4736, MSB-0010718C, or MDX-1105. In some embodiments, the anti-PD-L1 antibody is MSB0010718C (also called A09-246-2; Merck Serono), which is a monoclonal antibody that binds to PD-L1. Exemplary humanized anti-PD-L1 antibodies are described, e.g., in WO2013/079174. In some embodiments, the PD-L1 inhibitor is an anti-PD-L1 antibody, e.g., YW243.55.S70. The YW243.55.S70 antibody is described, e.g., in WO 2010/077634. In some embodiments, the PD-L1 inhibitor is MDX-1105 (also called BMS-936559), which is described, e.g., in WO2007/005874. In some embodiments, the PD-L1 inhibitor is MDPL3280A (Genentech/Roche), which is a human Fc-optimized IgG1 monoclonal antibody against PD-L1. See, e.g., U.S. Pat. No. 7,943,743 and U.S Publication No.: 20120039906. In some embodiments, the inhibitor of PD-L1 is an antibody molecule having a sequence substantially identical or similar thereto, e.g., a sequence at least 85%, 90%, 95% identical or higher to the sequence of YW243.55.S70, MPDL3280A, MEDI-4736, MSB-0010718C, or MDX-1105.

[1065] In some embodiments, the immune checkpoint inhibitor is a PD-L2 inhibitor, e.g., AMP-224 (which is a PD-L2 Fc fusion soluble receptor that blocks the interaction between PD1 and B7-H1. See, e.g., WO2010/027827 and WO2011/066342.

[1066] In some embodiments, the immune checkpoint inhibitor is a LAG-3 inhibitor, e.g., an anti LAG-3 antibody molecule. In some embodiments, the anti-LAG-3 antibody is BMS-986016 (also called BMS986016; Bristol-Myers Squibb). BMS-986016 and other humanized anti-LAG-3 antibodies are described, e.g., in US 2011/0150892, WO2010/019570, and WO2014/008218.

[1067] In some embodiments, the immune checkpoint inhibitor is a TIM-3 inhibitor, e.g., anti-TIM3 antibody molecule, e.g., described in U.S. Pat. No. 8,552,156, WO 2011/155607, EP 2581113 and U.S Publication No.: 2014/044728.

[1068] In some embodiments, the immune checkpoint inhibitor is a CTLA-4 inhibitor, e.g., anti-CTLA-4 antibody molecule. Exemplary anti-CTLA4 antibodies include Tremelimumab (IgG2 monoclonal antibody from Pfizer, formerly known as ticilimumab, CP-675,206); and Ipilimumab (also called MDX-010. CAS No. 477202-00-9). Other exemplary anti-CTLA-4 antibodies are described, e.g., in U.S. Pat. No. 5,811,097.

### Method of Expanding Cells

[1069] Any of the compositions and methods described herein can be used to expand an immune cell population. An immune cell provided herein includes an immune cell derived from a hematopoietic stem cell or an immune cell derived from a non-hematopoietic stem cell, e.g., by differentiation or de-differentiation.

[1070] An immune cell includes a hematopoictic stem cell, progeny thereof and/or cells that have differentiated from said HSC, e.g., lymphoid cells or myeloid cells. An immune cell can be an adaptive immune cell or an innate immune cell. Examples of immune cells include T cells, B cells, Natural Killer cells, Natural Killer T cells, neutrophils, dendritic cells, monocytes, macrophages, and granulocytes.

[1071] In some embodiments, an immune cell is a T cell. In some embodiments, a T cell includes a CD4+ T cell, a CD8+ T cell, a TCR alpha-beta T cell, a TCR gamma-delta T cell. In some embodiments, a T cell comprises a memory T cell (e.g., a central memory T cell, or an effector memory T cell (e.g., a TEMRA) or an effector T cell. In some embodiments, a T cell comprises a tumor infiltrating lymphocyte (TIL).

[1072] In some embodiments, an immune cell is an NK cell.

[1073] In some embodiments, an immune cell is a TIL. TILs are immune cells (e.g., T cells. B cells or NK cells) that can be found in a tumor or around a tumor (e.g., in the stroma or tumor microenvironment of a tumor), e.g., a solid tumor, e.g., as described herein. TILs can be obtained from a sample from a subject having cancer, e.g., a biopsy or a surgical sample. In some embodiments, TILs can be expanded using a method as described herein. In some embodiments, a population of expanded TILs, e.g., expanded using a method as described herein, can be administered to a subject to treat a disease, e.g., a cancer.

[1074] In some embodiments, immune cells, e.g., T cells (e.g., TILs), can be obtained from a unit of blood collected from a subject using any number of techniques known to the skilled artisan, such as Ficoll™ separation. In one aspect, cells from the circulating blood of an individual are obtained by apheresis. The apheresis product typically contains lymphocytes, including T cells, monocytes, granulocytes. B cells, other nucleated white blood cells, red blood cells, and platelets. In one aspect, the cells collected by apheresis may be washed to remove the plasma fraction and, optionally, to place the cells in an appropriate buffer or media for subsequent processing steps. In one embodiment, the cells are washed with phosphate buffered saline (PBS). In an alternative embodiment, the wash solution lacks calcium and may lack magnesium or may lack many if not all divalent cations. The methods described herein can include more than one selection step, e.g., more than one depletion step.

[1075] In one embodiment, the methods as described herein can utilize culture media conditions comprising DMEM. DMEM F12. RPMI 1640, and/or AIM V media. The media can be supplemented with glutamine. HEPES buffer (e.g., 10 mM), scrum (e.g., heat-inactivated serum, e.g., 10%), and/or beta mercaptoethanol (e.g., 55 μM). In some embodiments, the culture conditions as described herein comprise one or more supplements, cytokines, growth factors, or hormones. In some embodiments, the culture condition comprises one or more of IL-2, IL-15, or IL-7, or a combination thereof.

[1076] Immune effector cells such as T cells may be activated and expanded generally using methods as described, for example, in U.S. Pat. Nos. 6,352,694; 6,534,055; or 6,905,680. Generally, a population of immune cells, may be expanded by contact with an agent that stimulates a CD3/TCR complex associated signal and a ligand that stimulates a costimulatory molecule on the surface of the T cells; and/or by contact with a cytokine, e.g., IL-2, IL-15 or IL-7. T cell expansion protocols can also include stimulation, such as by contact with an anti-CD3 antibody, or antigen-binding fragment thereof, or an anti-CD2 antibody immobilized on a surface, or by contact with a protein kinase C activator (e.g., bryostatin) in conjunction with a calcium ionophore. For example, a population of T cells can be contacted with an anti-CD3 antibody and an anti-CD28 antibody, under conditions appropriate for stimulating proliferation of the T cells. To stimulate proliferation of either CD4+ T cells or CD8+ T cells, an anti-CD3 antibody and an anti-CD28 antibody can be used. Examples of an anti-CD28 antibody include 9.3, B-T3, XR-CD28 (Diaclone, Besançon, France) can be used as can other methods commonly known in the art (Berg et al., Transplant Proc. 30(8):3975-3977, 1998; Haanen et al., J. Exp. Med. 190 (9):13191328, 1999; Garland et al., J. Immunol Meth 227(1-2):53-63, 1999).

[1077] In some embodiments, a TIL population can also be expanded by methods known in the art. For example, a population of TILs can be expanded as described in Hall et al., Journal for Immuno Therapy of Cancer (2016) 4:61, the entire contents of which are hereby incorporated by reference. Briefly, TILs can be isolated from a sample by mechanical and/or physical digestion. The resultant TIL population can be stimulated with an anti-CD3 antibody in the presence of non-dividing feeder cells. In some embodiments, the TIL population can be cultured, e.g., expanded, in the presence of IL-2, e.g., human IL-2. In some embodiments, the TIL cells can be cultured, e.g., expanded for a period of at least 1-21 days, e.g., at least 1, 2, 3, 4, 5, 6, 7, 8, 9, 10, 11, 12, 13, 14, 15, 16, 17, 18, 19, 20 or 21 days.

[1078] As described herein, in some embodiments, an immune cell population (e.g., a T cell (e.g., a TEMRA cell or a TIL population) can be expanded by contacting the immune cell population with the multifunctional polypeptide molecule as described herein.

[1079] In some embodiments, the expansion occurs in vivo, e.g., in a subject. In some embodiments, a subject is administered the multifunctional polypeptide molecule as described herein resulting in expansion of immune cells in vivo.

[1080] In some embodiments, the expansion occurs ex vivo, e.g., in vitro. In some embodiments, cells from a subject, e.g., T cells, e.g., TIL cells, are expanded in vitro with the multifunctional polypeptide molecule as described herein. In some embodiments, the expanded TILs are administered to the subject to treat a disease or a symptom of a disease.

[1081] In some embodiments, a method of expansion as described herein results in an expansion of at least 1.1-10 fold, 10-20 fold, or 20-50 fold expansion. In some embodiments, the expansion is at least 1.1, 1.2, 1.3, 1.4, 1.5, 2, 3, 4, 5, 6, 7, 8, 9, 10, 15, 20, 25, 30, 35, 40, 45, 50, 55, 60, 65, 70, 75, 80, 85, 90, 100, 200, 300, 400, 500, 600, 700, 800, 900, 1000, 1500, 2000, 2500, 3000, 3500, 400, 4500, 5000, 5500, 6000, 6500, 7000, 7500, 8000, 8500, 9000, 9500, or 10000 fold expansion.

[1082] In some embodiments, a method of expansion as described herein comprises culturing, e.g., expanding, the cells for at least about 4 hours, 6 hours, 10 hours, 12 hours, 15 hours. 18 hours, 20 hours, or 22 hours. In some embodiments, a method of expansion as described herein comprises culturing, e.g., expanding, the cells for at least 1, 2, 3, 4, 5, 6, 7, 8, 9, 10, 11, 12, 13, 14, 15, 16, 17, 18, 19, 20 or 21 days. In some embodiments, a method of expansion as described herein comprises culturing, e.g., expanding, the cells for at least about 1 week, 2 weeks, 3 weeks, 4 weeks, 5 weeks, 6 weeks, 7 weeks or 8 weeks.

[1083] In some embodiments, a method of expansion as described herein is performed on immune cells obtained from a healthy subject.

[1084] In some embodiments, a method of expansion as described herein is performed on immune cells (e.g., TILs) obtained from a subject having a disease, e.g., a cancer, e.g., a solid tumor as described herein.

[1085] In some embodiments, a method of expansion as described herein further comprises contacting the population of cells with an agent, that promotes, e.g., increases, immune cell expansion. In some embodiments, the agent comprises an immune checkpoint inhibitor, e.g., a PD-1 inhibitor, a LAG-3 inhibitor, a CTLA4 inhibitor, or a TIM-3 inhibitor. In some embodiments, the agent comprises a 4-1BB agonist, e.g., an anti-4-1BB antibody.

[1086] Without wishing to be bound by theory, in some embodiments, the multifunctional polypeptide molecule as described herein can expand, e.g. selectively or preferentially expand, T cells expressing a T cell receptor (TCR) comprising a TCR alpha and/or TCR beta molecule, e.g., TCR alpha-beta T cells (αβ T cells). In some embodiments, the multifunctional polypeptide molecule as described herein does not expand, or induce proliferation of T cells expressing a TCR comprising a TCR gamma and/or TCR delta molecule, e.g., TCR gamma-delta T cells (γδ T cells). In some embodiments, the multifunctional polypeptide molecule as described herein selectively or preferentially expands αβ T cells over γδ T cells.

[1087] Without wishing to be bound by theory, in some embodiments, γδ T cells are associated with cytokine release syndrome (CRS) and/or neurotoxicity (NT). In some embodiments, the multispecific or multifunctional molecules as described herein result in selective expansion of non-γδ T cells, e.g., expansion of αβ T cells, thus reducing CRS and/or NT.

[1088] In some embodiments, any of the compositions or methods as described herein result in an immune cell population having a reduction of, e.g., depletion of, γδ T cells. In some embodiments, the immune cell population is contacted with an agent that reduces, e.g., inhibits or depletes, γδ T cells, e.g., an anti-IL-17 antibody or an agent that binds to a TCR gamma and/or TCR delta molecule.

[1089] In some embodiments, the multifunctional polypeptide molecule as described herein results in expansion of an immune cell, e.g., a T cell, a tumor infiltrating lymphocyte (TIL), an NK cell, or other immune cells (e.g., as described herein).

[1090] In some embodiments, binding of the multifunctional polypeptide molecule as described herein to a TCRβV region results in one, two, three or all of: (1) reduced T cell proliferation kinetics; (ii) cell killing, e.g., target cell killing, e.g. cancer cell killing, e.g., as measured by an assay of Example 4; (iii) increased Natural Killer (NK) cell proliferation, e.g., expansion; or (iv) expansion, e.g., at least about 1.1-10 expansion (e.g., at least about 1.1, 1.2, 1.3, 1.4, 1.5, 2, 3, 4, 5, 6, 7, 8, 9, or 10 fold expansion), of a population of T cells having a memory-like phenotype, e.g., as described herein, e.g., wherein (i)-(iv) are relative to the non-TCRβV-binding T cell engager.

[1091] In some embodiments, the method further comprises contacting the population of cells with an agent that promotes, e.g., increases, immune cell expansion. In some embodiments, the agent includes an immune checkpoint inhibitor, e.g., as described herein. In some embodiments, the agent includes a 4-1BB (CD127) agonist, e.g., an anti-4-1BB antibody.

[1092] In some embodiments, the method further comprises comprising contacting the population of cells with a non-dividing population of cells, e.g., feeder cells, e.g., irradiated allogenic human PBMCs.

[1093] In some embodiments, expansion of the population of immune cells, is compared to expansion of a similar population of cells with an antibody that binds to: a CD3 molecule, e.g., CD3 epsilon (CD3e) molecule; or a TCR alpha (TCRα) molecule.

[1094] In some embodiments, expansion of the population of immune cells, is compared to expansion of a similar population of cells not contacted with the anti-TCRβV antibody molecule or the multispecific or multifunctional molecules as described herein.

[1095] In some embodiments, expansion of the population of memory effector T cells, e.g., TEM cells, e.g., TEMRA cells, is compared to expansion of a similar population of cells with an antibody that binds to: a CD3 molecule, e.g., CD3 epsilon (CD3e) molecule; or a TCR alpha (TCRα) molecule.

[1096] In some embodiments, the method results in expansion of, e.g., selective or preferential expansion of. T cells expressing a T cell receptor (TCR) comprising a TCR alpha and/or TCR beta molecule, e.g., TCR alpha-beta T cells (αβ T cells).

[1097] In some embodiments, the method results in expansion of αβT cells over expansion of T cells expressing a TCR comprising a TCR gamma and/or TCR delta molecule, e.g., TCR gamma-delta T cells (γδ T cells). In some embodiments, expansion of αβT cells over γδ T cells results in reduced production of cytokines associated with CRS. In some embodiments, expansion of αβT cells over γδ T cells results in immune cells that have reduced capacity to, e.g., are less prone to, induce CRS upon administration into a subject.

[1098] In some embodiments, an immune cell population (e.g., T cells (e.g., TEMRA cells or TILs) or NK cells) cultured in the presence of, e.g., expanded with, the multifunctional polypeptide molecule as described herein does not induce CRS and/or NT when administered into a subject, e.g., a subject having a disease or condition as described herein.

[1099] In some embodiments, provided herein is a multifunctional polypeptide molecule as described herein comprising a non-murine, e.g., a human-like antibody molecule (e.g., a human or humanized antibody molecule), which binds, e.g., specifically binds, to a T cell receptor beta variable (TCRβV) region. In some embodiments, binding of the multifunctional polypeptide molecule as described herein results in expansion. e.g., at least about 1.1-50 fold expansion (e.g., at least about 1.5-40 fold, 2-35 fold, 3-30 fold, 5-25 fold, 8-20 fold, or 10-15 fold expansion), of a population of T cells, e.g., a population of T cells having a memory-like phenotype, e.g., CD45RA+ CCR7− T cells. In some embodiments, the population of T cells having a memory-like phenotype comprises CD4+ and/or CD8+ T cells. In some embodiments, the population of T cells having a memory-like phenotype comprises a population of memory T cells, e.g. T effector memory (TEM) cells, e.g., TEM cells expressing CD45RA (TEMRA) cells, e.g., CD4+ or CD8+ TEMRA cells. In some embodiments, the population of T cells having a memory-like phenotype does not express a senescent marker, e.g., CD57. In some embodiments, the population of T cells having a memory-like phenotype does not express an inhibitory receptor, e.g., OX40, 4-1BB, and/or ICOS.

[1100] In some embodiments, the population of T cells having a memory-like phenotype is a population of T cells with CD45RA+ CCR7− CD57−. In some embodiments, the population of T cells having a memory-like phenotype does not express an inhibitory receptor, e.g., OX40, 4-1BB, and/or ICOS.

[1101] In some embodiments, the population of T cells having a memory-like phenotype, e.g., as described herein, has increased proliferative capacity, e.g., as compared to a reference cell population, e.g., an otherwise similar population of cells that has not been contacted with an anti-TCRβV antibody or the multispecific or multifunctional molecules as described herein.

[1102] In some embodiments, the expansion is at least about 1.1-10 fold expansion (e.g., at least about 1.1, 1.2, 1.3, 1.4, 1.5, 2, 3, 4, 5, 6, 7, 8, 9, or 10 fold expansion).

[1103] In some embodiments, expansion of the population of T cells having a memory-like phenotype, e.g., memory effector T cells, e.g., TEM cells, e.g., TEMRA cells, e.g., CD4+ or CD8+ TEMRA cells, is compared to expansion of a similar population of cells with an antibody that binds to: a CD3 molecule, e.g., CD3 epsilon (CD3e) molecule; or a TCR alpha (TCRa) molecule.

[1104] In some embodiments, the population of expanded T cells having a memory-like phenotype, e.g., T effector memory cells, comprises cells T cells, e.g., CD3+, CD8+ or CD4+ T cells. In some embodiments, the population of expanded T cells having a memory-like phenotype. T effector memory cells, comprises CD3+ and CD8+ T cells. In some embodiments, the population of expanded T cells having a memory-like phenotype, e.g., T effector memory cells comprises CD3+ and CD4+ T cells.

[1105] In some embodiments, the population of expanded T cells having a memory-like phenotype, T effector memory (TEM) cells, comprises cells T cells, e.g., CD3+, CD8+ or CD4+ T cells, which express or re-express, CD45RA, e.g., CD45RA+. In some embodiments, the population comprises TEM cells expressing CD45RA, e.g., TEMRA cells. In some embodiments, expression of CD45RA on TEMRA cells, e.g., CD4+ or CD8+ TEMRA cells, can be detected by a method as described herein, e.g., flow cytometry.

[1106] In some embodiments, the population of T cells having a memory-like phenotype, e.g., TEMRA cells have low or no expression of CCR7, e.g., CCR7− or CCR7 low. In some embodiments, expression of CCR7 on TEMRA cells cannot be detected by a method as described herein, e.g., flow cytometry.

[1107] In some embodiments, the population of T cells having a memory-like phenotype, e.g., TEMRA cells express CD95, e.g., CD95+. In some embodiments, expression of CD95 on TEMRA cells can be detected by a method as described herein, e.g., flow cytometry.

[1108] In some embodiments, the population of T cells having a memory-like phenotype, e.g., TEMRA cells express CD45RA, e.g., CD45RA+, have low or no expression of CCR7, e.g., CCR7− or CCR7 low, and express CD95, e.g., CD95+. In some embodiments, the population of T cells having a memory-like phenotype, e.g., TEMRA cells can be identified as CD45RA+, CCR7− and CD95+ cells. In some embodiments, the population of T cells having a memory-like phenotype, e.g., TEMRA cells comprise CD3+, CD4+ or CD8+ T cells (e.g., CD3+ T cells, CD3+ CD8+ T cells, or CD3+ CD4+ T cells).

[1109] In some embodiments, the population of T cells having a memory-like phenotype does not express a senescent marker, e.g., CD57.

[1110] In some embodiments, the population of T cells having a memory-like phenotype does not express an inhibitory receptor, e.g., OX40, 4-1BB, and/or ICOS.

[1111] In some embodiments, binding of the multifunctional polypeptide molecule as described herein results in expansion, e.g., at least about 1.1-50 fold expansion (e.g., at least about 1.5-40 fold, 2-35 fold, 3-30 fold, 5-25 fold, 8-20 fold, or 10-15 fold expansion), of a subpopulation of T cells. In some embodiments, the multifunctional polypeptide molecule as described herein-activated (e.g., expanded) subpopulation of T cells resemble TEMRA cells in high expression of CD45RA and/or low expression of CCR7. In some embodiments, the multifunctional polypeptide molecule as described herein-activated (e.g., expanded) subpopulation of T cells do not display upregulation of the senescence markers CD57 and/or KLRGI. In some embodiments, the multifunctional polypeptide molecule as described herein-activated (e.g., expanded) subpopulation of T cells do not display upregulation of co-stimulatory molecules CD27 and/or CD28. In some embodiments, the multifunctional polypeptide molecule as described herein-activated (e.g., expanded) subpopulation of T cells are highly proliferative. In some embodiments, the multifunctional polypeptide molecule as described herein-activated (e.g., expanded) subpopulation of T cells secrete IL-2. In some embodiments, expression of surface markers on T cells can be detected by a method as described herein, e.g., flow cytometry. In some embodiments, the proliferative capability of T cells can be detected by a method as described herein, e.g., a method described in Example 4. In some embodiments, cytokine expression of T cells can be detected by a method as described herein, e.g., a method described in Examples 10 and 35. In some embodiments, the expansion is at least about 1.1-10 fold expansion (e.g., at least about 1.1, 1.2, 1.3, 1.4, 1.5, 2, 3, 4, 5, 6, 7, 8, 9, or 10 fold expansion). In some embodiments, the expansion is compared to expansion of a similar population of cells with an antibody that binds to a CD3 molecule, e.g., CD3 epsilon (CD3e) molecule; or a TCR alpha (TCRα) molecule.

[1112] In some embodiments, binding of the multifunctional polypeptide molecule as described herein results in proliferation, e.g., expansion, e.g., at least about 1.1-50 fold expansion (e.g., at least about 1.5-40 fold, 2-35 fold, 3-30 fold, 5-25 fold, 8-20 fold, or 10-15 fold expansion), of a population of Natural Killer (NK) cells. In some embodiments, the expansion of NK cells is at least about 1.1-30 fold expansion (e.g., at least about 1.1, 1.2, 1.3, 1.4, 1.5, 2, 3, 4, 5, 6, 7, 8, 9, 10, 15, 20, 25, or at least about 1.1-5, 5-10, 10-15, 15-20, 20-25, or 25-30 fold expansion). In some embodiments, the expansion of NK cells is measure by an assay of Example 4. In some embodiments, the expansion of NK cells by, e.g., binding of, the multifunctional polypeptide molecule as described herein is compared to expansion of an otherwise similar population not contacted with the multifunctional polypeptide molecule as described herein.

[1113] In some embodiments, binding of the multifunctional polypeptide molecule as described herein results in cell killing, e.g., target cell killing, e.g. cancer cell killing. In some embodiments, the cancer cell is a hematological cancer cell or a solid tumor cell. In some embodiments, the cancer cell is a multiple myeloma cell. In some embodiments, binding of the multifunctional polypeptide molecule as described herein results in cell killing in vitro or in vivo. In some embodiments, cell killing is measured by an assay of Example 4.

[1114] In some embodiments, binding of the multifunctional polypeptide molecule as described herein to a TCRβV region results in an increase or decrease of at least 2, 5, 10, 20, 50, 100, 200, 300, 400, 500, 600, 700, 800, 900, 1000, or 2000 fold, or at least 2-2000 fold (e.g., 5-1000, 10-900, 20-800, 50-700, 100-600, 200-500, or 300-400 fold) of any of the activities described herein compared the activity of 16G8 or TM23 murine antibody, or a humanized version thereof as described in U.S. Pat. No. 5,861,155.

[1115] In some embodiments, the method comprises expanding, e.g., increasing the number of, an immune cell population in the subject. In some embodiments, provided herein is a method of expanding, e.g., increasing the number of, an immune cell population comprising, contacting the immune cell population with an effective amount of the multifunctional polypeptide molecule as described herein. In some embodiments, the expansion occurs in vivo or ex vivo (e.g., in vitro).

[1116] In some embodiments, provided herein is a method of expanding, e.g., increasing the number of, an immune cell population comprising, contacting the immune cell population with a multifunctional polypeptide molecule as described herein comprising an antibody molecule, e.g., humanized antibody molecule, which binds, e.g., specifically binds, to a T cell receptor beta variable chain (TCRβV) region (e.g., anti-TCRβV antibody molecule), thereby expanding the immune cell population. In some embodiments, the expansion occurs in vivo or ex vivo (e.g., in vitro).

[1117] In some embodiments, provided herein is a method of expanding a population of immune effector cells from a subject having a cancer, the method comprising: (i) isolating a biological sample comprising a population of immune effector cells from the subject: e.g., a peripheral blood sample, biopsy sample, or bone marrow sample; (ii) acquiring a value of the status of one or more TCRβV molecules for the subject, e.g., in the biological sample from the subject, wherein said value comprises a measure of the presence of, e.g., level or activity of, a TCRβV molecule in a sample from the subject compared to a reference value, e.g., a sample from a health subject, wherein a value that is higher, e.g., increased, in the subject relative to the reference, e.g., healthy subject, is indicative of the presence of cancer in the subject, and (iii) contacting the biological sample comprising a population of immune effector cells with the multifunctional polypeptide molecule as described herein.

[1118] In some embodiments, the method further comprises administering the population of immune effector cells contacted with the multifunctional polypeptide molecule as described herein to the subject.

[1119] In some embodiments, a higher, e.g., increased, level or activity of one or more TCRβV molecules in a subject, e.g., in a sample from a subject, is indicative of a bias, e.g., a preferential expansion, e.g., clonal expansion, of T cells expressing said one or more TCRβV molecules in the subject.

[1120] Accordingly, provided herein are, inter alia, multispecific or multifunctional molecules comprising TCRβV-binding moieties as described herein (e.g., multispecific or multifunctional antibody molecules) that comprise anti-TCRβV antibody molecules, nucleic acids encoding the same, methods of producing the aforesaid molecules, pharmaceutical compositions comprising aforesaid molecules, and methods of treating a disease or disorder, e.g., cancer, using the aforesaid molecules. The antibody molecules and pharmaceutical compositions as described herein can be used (alone or in combination with other agents or therapeutic modalities) to treat, prevent and/or diagnose disorders and conditions, e.g., cancer, e.g., as described herein.

### Exemplary Multifunctional Polypeptide Molecule

[1121] Any of the compositions and methods described herein can be used to expand an immune cell population. An immune cell provided herein includes an immune cell derived from a hematopoietic stem cell or an immune cell derived from a non-hematopoietic stem cell, e.g., by differentiation or de-differentiation.

[1122] In some embodiments, the multifunctional polypeptide molecule comprises: (i) a first polypeptide chain comprising a sequence having at least 50%, 55%, 60%, 65%, 70%, 75%, 80%, 85%, 90%, 95%, 97%, 98%, 99%, 99.5%, 99.6%, 99.7%, 99.8%, or 99.9% sequence identity to the sequence of SEQ ID NO: 1346, and a sequence having at least 50%, 55%, 60%, 65%, 70%, 75%, 80%, 85%, 90%, 95%, 97%, 98%, 99%, 99.5%, 99.6%, 99.7%, 99.8%, or 99.9% sequence identity to the sequence of SEQ ID NO: 3649; (ii) a second polypeptide chain comprising a sequence having at least 50%, 55%, 60%, 65%, 70%, 75%, 80%, 85%, 90%, 95%, 97%, 98%, 99%, 99.5%, 99.6%, 99.7%, 99.8%, or 99.9% sequence identity to the sequence of SEQ ID NO: 3523, a sequence having at least 50%, 55%, 60%, 65%, 70%, 75%, 80%, 85%, 90%, 95%, 97%, 98%, 99%, 99.5%, 99.6%, 99.7%, 99.8%, or 99.9% sequence identity to the sequence of SEQ ID NO: 2170, and a sequence having at least 50%, 55%, 60%, 65%, 70%, 75%, 80%, 85%, 90%, 95%, 97%, 98%, 99%, 99.5%, 99.6%, 99.7%, 99.8%, or 99.9% sequence identity to the sequence of SEQ ID NO: 3648; and (iii) a third polypeptide chain comprising a sequence having at least 50%, 55%, 60%, 65%, 70%, 75%, 80%, 85%, 90%, 95%, 97%, 98%, 99%, 99.5%, 99.6%, 99.7%, 99.8%, or 99.9% sequence identity to the sequence of SEQ ID NO: 1349, and a sequence having at least 50%, 55%, 60%, 65%, 70%, 75%, 80%, 85%, 90%, 95%, 97%, 98%, 99%, 99.5%, 99.6%, 99.7%, 99.8%, or 99.9% sequence identity to the sequence of SEQ ID NO: 3644.

[1123] In some embodiments, the multifunctional polypeptide molecule comprises: (i) a first polypeptide chain comprising the sequence of SEQ ID NO: 1346, and the sequence of SEQ ID NO: 3649; (ii) a second polypeptide chain comprising the sequence of SEQ ID NO: 3523, the sequence of SEQ ID NO: 2170, and the sequence of SEQ ID NO: 3648; and (iii) a third polypeptide chain comprising the sequence of SEQ ID NO: 1349, and the sequence of SEQ ID NO: 3644.

[1124] In some embodiments, the multifunctional polypeptide molecule comprises: (i) a first polypeptide chain comprising, from the N-terminus to the C-terminus, a sequence having at least 50%, 55%, 60%, 65%, 70%, 75%, 80%, 85%, 90%, 95%, 97%, 98%, 99%, 99.5%, 99.6%, 99.7%, 99.8%, or 99.9% sequence identity to the sequence of SEQ ID NO: 1346 operatively linked to a sequence having at least 50%, 55%, 60%, 65%, 70%, 75%, 80%, 85%, 90%, 95%, 97%, 98%, 99%, 99.5%, 99.6%, 99.7%, 99.8%, or 99.9% sequence identity to the sequence of SEQ ID NO: 3649; (ii) a second polypeptide chain comprising, from the N-terminus to the C-terminus, a sequence having at least 50%, 55%, 60%, 65%, 70%, 75%, 80%, 85%, 90%, 95%, 97%, 98%, 99%, 99.5%, 99.6%, 99.7%, 99.8%, or 99.9% sequence identity to the sequence of SEQ ID NO: 3523 operatively linked to a sequence having at least 50%, 55%, 60%, 65%, 70%, 75%, 80%, 85%, 90%, 95%, 97%, 98%, 99%, 99.5%, 99.6%, 99.7%, 99.8%, or 99.9% sequence identity to the sequence of SEQ ID NO: 2170 operatively linked to a sequence having at least 50%, 55%, 60%, 65%, 70%, 75%, 80%, 85%, 90%, 95%, 97%, 98%, 99%, 99.5%, 99.6%, 99.7%, 99.8%, or 99.9% sequence identity to the sequence of SEQ ID NO: 3648; and (iii) a third polypeptide chain comprising, from the N-terminus to the C-terminus, a sequence having at least 50%, 55%, 60%, 65%, 70%, 75%, 80%, 85%, 90%, 95%, 97%, 98%, 99%, 99.5%, 99.6%. 99.7%, 99.8%, or 99.9% sequence identity to the sequence of SEQ ID NO: 1349 operatively linked to a sequence having at least 50%, 55%, 60%, 65%, 70%, 75%, 80%, 85%, 90%, 95%, 97%, 98%, 99%, 99.5%, 99.6%, 99.7%, 99.8%, or 99.9% sequence identity to the sequence of SEQ ID NO: 3644.

[1125] In some embodiments, the multifunctional polypeptide molecule comprises: (i) a first polypeptide chain comprising, from the N-terminus to the C-terminus, the sequence of SEQ ID NO: 1346 operatively linked to the sequence of SEQ ID NO. 3649; (ii) a second polypeptide chain comprising, from the N-terminus to the C-terminus, the sequence of SEQ ID NO: 3523 operatively linked to the sequence of SEQ ID NO: 2170 operatively linked to the sequence of SEQ ID NO: 3648; and (iii) a third polypeptide chain comprising, from the N-terminus to the C-terminus, the sequence of SEQ ID NO: 1349 operatively linked to the sequence of SEQ ID NO: 3644.

[1126] In some embodiments, a sequence having at least 50%, 55%, 60%, 65%, 70%, 75%, 80%, 85%, 90%, 95%, 97%, 98%, 99%, 99.5%, 99.6%, 99.7%, 99.8%, or 99.9% sequence identity to the sequence of SEQ ID NO: 3523 is operatively linked to a sequence having at least 50%, 55%, 60%, 65%, 70%, 75%, 80%, 85%, 90%, 95%, 97%, 98%, 99%, 99.5%, 99.6%, 99.7%, 99.8%, or 99.9% sequence identity to the sequence of SEQ ID NO: 2170 via a sequence having at least 50%, 55%, 60%, 65%, 70%, 75%, 80%, 85%, 90%, 95%, 97%, 98%, 99%, 99.5%, 99.6%, 99.7%, 99.8%, or 99.9% sequence identity to the sequence of SEQ ID NO: 3524, a sequence having at least 50%, 55%, 60%, 65%, 70%, 75%, 80%, 85%, 90%, 95%, 97%, 98%, 99%, 99.5%, 99.6%, 99.7%, 99.8%, or 99.9% sequence identity to the sequence of SEQ ID NO: 2170 is operatively linked to a sequence having at least 50%, 55%, 60%, 65%, 70%, 75%, 80%, 85%, 90%, 95%, 97%, 98%, 99%, 99.5%, 99.6%, 99.7%, 99.8%, or 99.9% sequence identity to the sequence of SEQ ID NO: 3648 via a sequence having at least 50%, 55%, 60%, 65%, 70%, 75%, 80%, 85%, 90%, 95%, 97%, 98%, 99%, 99.5%, 99.6%, 99.7%, 99.8%, or 99.9% sequence identity to the sequence of SEQ ID NO: 3308, or a combination thereof.

[1127] In some embodiments, the sequence of SEQ ID NO: 3523 is operatively linked to the sequence of SEQ ID NO: 2170 via the sequence of SEQ ID NO: 3524, the sequence of SEQ ID NO: 2170 is operatively linked to the sequence of SEQ ID NO: 3648 via the sequence of SEQ ID NO: 3308, or a combination thereof.

[1128] In some embodiments, the multifunctional polypeptide molecule comprises: (i) a first polypeptide chain comprising a sequence having at least 50%, 55%, 60%, 65%, 70%, 75%, 80%, 85%, 90%, 95%, 97%, 98%, 99%, 99.5%, 99.6%, 99.7%, 99.8%, or 99.9% sequence identity to the sequence of SEQ ID NO: 3517; (ii) a second polypeptide chain comprising a sequence having at least 50%, 55%, 60%, 65%, 70%, 75%, 80%, 85%, 90%, 95%, 97%, 98%, 99%, 99.5%, 99.6%, 99.7%, 99.8%, or 99.9% sequence identity to the sequence of SEQ ID NO: 3519; and (iii) a third polypeptide chain comprising a sequence having at least 50%, 55%, 60%, 65%, 70%, 75%, 80%, 85%, 90%, 95%, 97%, 98%, 99%, 99.5%, 99.6%, 99.7%, 99.8%, or 99.9% sequence identity to the sequence of SEQ ID NO: 3518.

[1129] In some embodiments, the multifunctional polypeptide molecule comprises: (i) a first polypeptide chain comprising the sequence of SEQ ID NO. 3517; (ii) a second polypeptide chain comprising the sequence of SEQ ID NO: 3519; and (iii) a third polypeptide chain comprising to the sequence of SEQ ID NO: 3518.

[1130] In some embodiments, the multifunctional polypeptide molecule comprises: (i) a first polypeptide chain comprising a sequence having at least 50%, 55%, 60%, 65%, 70%, 75%, 80%, 85%, 90%, 95%, 97%, 98%, 99%, 99.5%, 99.6%, 99.7%, 99.8%, or 99.9% sequence identity to the sequence of SEQ ID NO: 1346, and a sequence having at least 50%, 55%, 60%, 65%, 70%, 75%, 80%, 85%, 90%, 95%, 97%, 98%, 99%. 99.5%, 99.6%, 99.7%, 99.8%, or 99.9% sequence identity to the sequence of SEQ ID NO: 3649; (ii) a second polypeptide chain comprising a sequence having at least 50%, 55%, 60%, 65%, 70%, 75%, 80%, 85%, 90%, 95%, 97%, 98%, 99%, 99.5%, 99.6%, 99.7%, 99.8%, or 99.9% sequence identity to the sequence of SEQ ID NO: 2170, and a sequence having at least 50%, 55%, 60%, 65%, 70%, 75%, 80%, 85%, 90%, 95%, 97%, 98%, 99%, 99.5%, 99.6%, 99.7%, 99.8%, or 99.9% sequence identity to the sequence of SEQ ID NO: 3648; and (iii) a third polypeptide chain comprising a sequence having at least 50%, 55%, 60%, 65%, 70%, 75%, 80%, 85%, 90%, 95%, 97%, 98%, 99%, 99.5%, 99.6%, 99.7%, 99.8%, or 99.9% sequence identity to the sequence of SEQ ID NO. 1349, and a sequence having at least 50%, 55%, 60%, 65%, 70%, 75%, 80%, 85%, 90%, 95%, 97%, 98%, 99%, 99.5%, 99.6%, 99.7%, 99.8%, or 99.9% sequence identity to the sequence of SEQ ID NO: 3644.

[1131] In some embodiments, the multifunctional polypeptide molecule comprises: (i) a first polypeptide chain comprising the sequence of SEQ ID NO. 1346, and the sequence of SEQ ID NO: 3649; (ii) a second polypeptide chain comprising the sequence of SEQ ID NO: 2170, and the sequence of SEQ ID NO: 3648; and (iii) a third polypeptide chain comprising the sequence of SEQ ID NO: 1349, and the sequence of SEQ ID NO: 3644.

[1132] In some embodiments, the multifunctional polypeptide molecule comprises: (i) a first polypeptide chain comprising, from the N-terminus to the C-terminus, a sequence having at least 50%, 55%, 60%, 65%, 70%, 75%, 80%, 85%, 90%, 95%, 97%, 98%, 99%, 99.5%, 99.6%, 99.7%, 99.8%, or 99.9% sequence identity to the sequence of SEQ ID NO: 1346 operatively linked to a sequence having at least 50%, 55%, 60%, 65%, 70%, 75%, 80%, 85%, 90%, 95%, 97%, 98%, 99%, 99.5%, 99.6%, 99.7%, 99.8%, or 99.9% sequence identity to the sequence of SEQ ID NO: 3649; (ii) a second polypeptide chain comprising, from the N-terminus to the C-terminus, a sequence having at least 50%, 55%, 60%, 65%, 70%, 75%, 80%, 85%, 90%, 95%, 97%, 98%, 99%, 99.5%, 99.6%, 99.7%, 99.8%, or 99.9% sequence identity to the sequence of SEQ ID NO: 2170 operatively linked to a sequence having at least 50%, 55%, 60%, 65%, 70%, 75%, 80%, 85%, 90%, 95%, 97%, 98%, 99%, 99.5%, 99.6%, 99.7%, 99.8%, or 99.9% sequence identity to the sequence of SEQ ID NO: 3648; and (iii) a third polypeptide chain comprising, from the N-terminus to the C-terminus, a sequence having at least 50%, 55%, 60%, 65%, 70%, 75%, 80%, 85%, 90%, 95%, 97%, 98%, 99%, 99.5%, 99.6%. 99.7%, 99.8%, or 99.9% sequence identity to the sequence of SEQ ID NO: 1349 operatively linked to a sequence having at least 50%, 55%, 60%, 65%, 70%, 75%, 80%, 85%, 90%, 95%, 97%, 98%, 99%, 99.5%, 99.6%, 99.7%, 99.8%, or 99.9% sequence identity to the sequence of SEQ ID NO: 3644.

[1133] In some embodiments, the multifunctional polypeptide molecule comprises: (i) a first polypeptide chain comprising, from the N-terminus to the C-terminus, the sequence of SEQ ID NO: 1346 operatively linked to the sequence of SEQ ID NO. 3649; (ii) a second polypeptide chain comprising, from the N-terminus to the C-terminus, the sequence of SEQ ID NO: 2170 operatively linked to the sequence of SEQ ID NO: 3648; and (iii) a third polypeptide chain comprising, from the N-terminus to the C-terminus, the sequence of SEQ ID NO: 1349 operatively linked to the sequence of SEQ ID NO: 3644.

[1134] In some embodiments, a sequence having at least 50%, 55%, 60%, 65%, 70%, 75%, 80%, 85%, 90%, 95%, 97%, 98%, 99%, 99.5%, 99.6%, 99.7%, 99.8%, or 99.9% sequence identity to the sequence of SEQ ID NO: 2170 is operatively linked to a sequence having at least 50%, 55%, 60%, 65%, 70%, 75%, 80%, 85%, 90%, 95%, 97%, 98%, 99%, 99.5%, 99.6%, 99.7%, 99.8%, or 99.9% sequence identity to the sequence of SEQ ID NO: 3648 via a sequence having at least 50%, 55%, 60%, 65%, 70%, 75%, 80%, 85%, 90%, 95%, 97%, 98%, 99%, 99.5%, 99.6%, 99.7%, 99.8%, or 99.9% sequence identity to the sequence of SEQ ID NO: 3308, or a combination thereof.

[1135] In some embodiments, the sequence of SEQ ID NO: 2170 is operatively linked to the sequence of SEQ ID NO: 3648 via the sequence of SEQ ID NO: 3308, or a combination thereof.

[1136] In some embodiments, the multifunctional polypeptide molecule comprises: (i) a first polypeptide chain comprising a sequence having at least 50%, 55%, 60%, 65%, 70%, 75%, 80%, 85%, 90%, 95%, 97%, 98%, 99%, 99.5%, 99.6%, 99.7%, 99.8%, or 99.9% sequence identity to the sequence of SEQ ID NO: 3517; (ii) a second polypeptide chain comprising a sequence having at least 50%, 55%, 60%, 65%, 70%, 75%, 80%, 85%, 90%, 95%, 97%, 98%, 99%, 99.5%, 99.6%, 99.7%, 99.8%, or 99.9% sequence identity to the sequence of SEQ ID NO: 3520; and (iii) a third polypeptide chain comprising a sequence having at least 50%, 55%, 60%, 65%, 70%, 75%, 80%, 85%, 90%, 95%, 97%, 98%, 99%, 99.5%, 99.6%, 99.7%, 99.8%, or 99.9% sequence identity to the sequence of SEQ ID NO: 3518.

[1137] In some embodiments, the multifunctional polypeptide molecule comprises: (i) a first polypeptide chain comprising the sequence of SEQ ID NO: 3517; (ii) a second polypeptide chain comprising the sequence of SEQ ID NO: 3520; and (iii) a third polypeptide chain comprising to the sequence of SEQ ID NO: 3518.

[1138] In some embodiments, the IL-2 molecule or a functional fragment or a functional variant thereof or the IL-2 C125A mutant molecule or a functional fragment or a functional variant thereof is operatively linked to the immunoglobulin heavy chain constant region via a linker.

[1139] In some embodiments, the multifunctional polypeptide molecule comprises: (i) a first polypeptide chain comprising a sequence having at least 50%, 55%, 60%, 65%, 70%, 75%, 80%, 85%, 90%, 95%, 97%, 98%, 99%, 99.5%, 99.6%, 99.7%, 99.8%, or 99.9% sequence identity to the sequence of SEQ ID NO: 1346, and a sequence having at least 50%, 55%, 60%, 65%, 70%, 75%, 80%, 85%, 90%, 95%, 97%, 98%, 99%, 99.5%, 99.6%, 99.7%, 99.8%, or 99.9% sequence identity to the sequence of SEQ ID NO: 3649; (ii) a second polypeptide chain comprising a sequence having at least 50%, 55%, 60%, 65%, 70%, 75%, 80%, 85%, 90%, 95%, 97%, 98%, 99%, 99.5%, 99.6%, 99.7%, 99.8%, or 99.9% sequence identity to the sequence of SEQ ID NO: 2270, and a sequence having at least 50%, 55%, 60%, 65%, 70%, 75%, 80%, 85%, 90%, 95%, 97%, 98%, 99%, 99.5%, 99.6%, 99.7%, 99.8%, or 99.9% sequence identity to the sequence of SEQ ID NO: 3648; and (iii) a third polypeptide chain comprising a sequence having at least 50%, 55%, 60%, 65%, 70%, 75%, 80%, 85%, 90%, 95%, 97%, 98%, 99%, 99.5%, 99.6%, 99.7%, 99.8%, or 99.9% sequence identity to the sequence of SEQ ID NO: 1349, and a sequence having at least 50%, 55%, 60%, 65%, 70%, 75%, 80%, 85%, 90%, 95%, 97%, 98%, 99%, 99.5%, 99.6%, 99.7%, 99.8%, or 99.9% sequence identity to the sequence of SEQ ID NO: 3644.

[1140] In some embodiments, the IL-2 molecule or a functional fragment or a functional variant thereof or the IL-2 C125A mutant molecule or a functional fragment or a functional variant thereof is operatively linked to the immunoglobulin heavy chain constant region via a linker.

[1141] In some embodiments, the multifunctional polypeptide molecule comprises: (i) a first polypeptide chain comprising the sequence of SEQ ID NO. 1346, and the sequence of SEQ ID NO: 3649; (ii) a second polypeptide chain comprising the sequence of SEQ ID NO: 2270, and the sequence of SEQ ID NO: 3648; and (iii) a third polypeptide chain comprising the sequence of SEQ ID NO: 1349, and the sequence of SEQ ID NO: 3644.

[1142] In some embodiments, the multifunctional polypeptide molecule comprises: (i) a first polypeptide chain comprising, from the N-terminus to the C-terminus, a sequence having at least 50%, 55%, 60%, 65%, 70%, 75%, 80%, 85%, 90%, 95%, 97%, 98%, 99%, 99.5%, 99.6%, 99.7%, 99.8%, or 99.9% sequence identity to the sequence of SEQ ID NO: 1346 operatively linked to a sequence having at least 50%, 55%, 60%, 65%, 70%, 75%, 80%, 85%, 90%, 95%, 97%, 98%, 99%, 99.5%, 99.6%, 99.7%, 99.8%, or 99.9% sequence identity to the sequence of SEQ ID NO: 3649; (ii) a second polypeptide chain comprising, from the N-terminus to the C-terminus, a sequence having at least 50%, 55%, 60%, 65%, 70%, 75%, 80%, 85%, 90%, 95%, 97%, 98%, 99%, 99.5%, 99.6%, 99.7%, 99.8%, or 99.9% sequence identity to the sequence of SEQ ID NO: 2270 operatively linked to a sequence having at least 50%, 55%, 60%, 65%, 70%, 75%, 80%, 85%, 90%, 95%, 97%, 98%, 99%, 99.5%, 99.6%, 99.7%, 99.8%, or 99.9% sequence identity to the sequence of SEQ ID NO: 3648; and (iii) a third polypeptide chain comprising, from the N-terminus to the C-terminus, a sequence having at least 50%, 55%, 60%, 65%, 70%, 75%, 80%, 85%, 90%, 95%, 97%, 98%, 99%, 99.5%, 99.6%. 99.7%, 99.8%, or 99.9% sequence identity to the sequence of SEQ ID NO: 1349 operatively linked to a sequence having at least 50%, 55%, 60%, 65%, 70%, 75%, 80%, 85%, 90%, 95%, 97%, 98%, 99%, 99.5%, 99.6%, 99.7%, 99.8%, or 99.9% sequence identity to the sequence of SEQ ID NO: 3644.

[1143] In some embodiments, the multifunctional polypeptide molecule comprises: (i) a first polypeptide chain comprising, from the N-terminus to the C-terminus, the sequence of SEQ ID NO: 1346 operatively linked to the sequence of SEQ ID NO. 3649; (ii) a second polypeptide chain comprising, from the N-terminus to the C-terminus, the sequence of SEQ ID NO: 2270 operatively linked to the sequence of SEQ ID NO: 3648; and (iii) a third polypeptide chain comprising, from the N-terminus to the C-terminus, the sequence of SEQ ID NO: 1349 operatively linked to the sequence of SEQ ID NO: 3644.

[1144] In some embodiments, a sequence having at least 50%, 55%, 60%, 65%, 70%, 75%, 80%, 85%, 90%, 95%, 97%, 98%, 99%, 99.5%, 99.6%, 99.7%, 99.8%, or 99.9% sequence identity to the sequence of SEQ ID NO: 2270 is operatively linked to a sequence having at least 50%, 55%, 60%, 65%, 70%, 75%, 80%, 85%, 90%, 95%, 97%, 98%, 99%, 99.5%, 99.6%, 99.7%, 99.8%, or 99.9% sequence identity to the sequence of SEQ ID NO: 3648 via a sequence having at least 50%, 55%, 60%, 65%, 70%, 75%, 80%, 85%, 90%, 95%, 97%, 98%, 99%, 99.5%, 99.6%, 99.7%, 99.8%, or 99.9% sequence identity to the sequence of SEQ ID NO: 3308, or a combination thereof.

[1145] In some embodiments, the sequence of SEQ ID NO: 2270 is operatively linked to the sequence of SEQ ID NO: 3648 via the sequence of SEQ ID NO: 3308, or a combination thereof.

[1146] In some embodiments, the multifunctional polypeptide molecule comprises: (i) a first polypeptide chain comprising a sequence having at least 50%, 55%, 60%, 65%, 70%, 75%, 80%, 85%, 90%, 95%, 97%, 98%, 99%, 99.5%, 99.6%, 99.7%, 99.8%, or 99.9% sequence identity to the sequence of SEQ ID NO: 3517; (ii) a second polypeptide chain comprising a sequence having at least 50%, 55%, 60%, 65%, 70%, 75%, 80%, 85%, 90%, 95%, 97%, 98%, 99%, 99.5%, 99.6%, 99.7%, 99.8%, or 99.9% sequence identity to the sequence of SEQ ID NO: 3521; and (iii) a third polypeptide chain comprising a sequence having at least 50%, 55%, 60%, 65%, 70%, 75%, 80%, 85%, 90%, 95%, 97%, 98%, 99%, 99.5%, 99.6%, 99.7%, 99.8%, or 99.9% sequence identity to the sequence of SEQ ID NO: 3518.

[1147] In some embodiments, the multifunctional polypeptide molecule comprises: (i) a first polypeptide chain comprising the sequence of SEQ ID NO: 3517; (ii) a second polypeptide chain comprising the sequence of SEQ ID NO: 3521; and (iii) a third polypeptide chain comprising to the sequence of SEQ ID NO: 3518.

[1148] In some embodiments, the multifunctional polypeptide molecule comprises: (i) a first polypeptide chain comprising a sequence having at least 50%, 55%, 60%, 65%, 70%, 75%, 80%, 85%, 90%, 95%, 97%, 98%, 99%, 99.5%, 99.6%, 99.7%, 99.8%, or 99.9% sequence identity to the sequence of SEQ ID NO: 3530, and a sequence having at least 50%, 55%, 60%, 65%, 70%, 75%, 80%, 85%, 90%, 95%, 97%, 98%, 99%. 99.5%, 99.6%, 99.7%, 99.8%, or 99.9% sequence identity to the sequence of SEQ ID NO: 3531; (ii) a second polypeptide chain comprising a sequence having at least 50%, 55%, 60%, 65%, 70%, 75%, 80%, 85%, 90%, 95%, 97%, 98%, 99%, 99.5%, 99.6%, 99.7%, 99.8%, or 99.9% sequence identity to the sequence of SEQ ID NO: 2191, and a sequence having at least 50%, 55%, 60%, 65%, 70%, 75%, 80%, 85%, 90%, 95%, 97%, 98%, 99%, 99.5%, 99.6%, 99.7%, 99.8%, or 99.9% sequence identity to the sequence of SEQ ID NO: 3533; and (iii) a third polypeptide chain comprising a sequence having at least 50%, 55%, 60%, 65%, 70%, 75%, 80%, 85%, 90%, 95%, 97%, 98%, 99%, 99.5%, 99.6%, 99.7%, 99.8%, or 99.9% sequence identity to the sequence of SEQ ID NO: 3527, and a sequence having at least 50%, 55%, 60%, 65%, 70%, 75%, 80%, 85%, 90%, 95%, 97%, 98%, 99%, 99.5%, 99.6%, 99.7%, 99.8%, or 99.9% sequence identity to the sequence of SEQ ID NO: 3528.

[1149] In some embodiments, the multifunctional polypeptide molecule comprises: (i) a first polypeptide chain comprising the sequence of SEQ ID NO: 3530, and the sequence of SEQ ID NO: 3531; (ii) a second polypeptide chain comprising the sequence of SEQ ID NO: 2191, and the sequence of SEQ ID NO: 3533; and (iii) a third polypeptide chain comprising the sequence of SEQ ID NO: 3527, and the sequence of SEQ ID NO: 3528.

[1150] In some embodiments, the multifunctional polypeptide molecule comprises: (i) a first polypeptide chain comprising, from the N-terminus to the C-terminus, a sequence having at least 50%, 55%, 60%, 65%, 70%, 75%, 80%, 85%, 90%, 95%, 97%, 98%, 99%, 99.5%, 99.6%, 99.7%, 99.8%, or 99.9% sequence identity to the sequence of SEQ ID NO: 3530 operatively linked to a sequence having at least 50%, 55%, 60%, 65%, 70%, 75%, 80%, 85%, 90%, 95%, 97%, 98%, 99%, 99.5%, 99.6%, 99.7%, 99.8%, or 99.9% sequence identity to the sequence of SEQ ID NO: 3531; (ii) a second polypeptide chain comprising, from the N-terminus to the C-terminus, a sequence having at least 50%, 55%, 60%, 65%, 70%, 75%, 80%, 85%, 90%, 95%, 97%, 98%, 99%, 99.5%, 99.6%, 99.7%, 99.8%, or 99.9% sequence identity to the sequence of SEQ ID NO: 2191 operatively linked to a sequence having at least 50%, 55%, 60%, 65%, 70%, 75%, 80%, 85%, 90%, 95%, 97%, 98%, 99%, 99.5%, 99.6%, 99.7%, 99.8%, or 99.9% sequence identity to the sequence of SEQ ID NO: 3533; and (iii) a third polypeptide chain comprising, from the N-terminus to the C-terminus, a sequence having at least 50%, 55%, 60%, 65%, 70%, 75%, 80%, 85%, 90%, 95%, 97%, 98%, 99%, 99.5%, 99.6%, 99.7%, 99.8%, or 99.9% sequence identity to the sequence of SEQ ID NO: 3527 operatively linked to a sequence having at least 50%, 55%, 60%, 65%, 70%, 75%, 80%, 85%, 90%, 95%, 97%, 98%, 99%, 99.5%, 99.6%, 99.7%, 99.8%, or 99.9% sequence identity to the sequence of SEQ ID NO: 3528.

[1151] In some embodiments, the multifunctional polypeptide molecule comprises: (i) a first polypeptide chain comprising, from the N-terminus to the C-terminus, the sequence of SEQ ID NO: 3530 operatively linked to the sequence of SEQ ID NO: 3531; (ii) a second polypeptide chain comprising, from the N-terminus to the C-terminus, the sequence of SEQ ID NO: 2191 operatively linked to the sequence of SEQ ID NO: 3533; and (iii) a third polypeptide chain comprising, from the N-terminus to the C-terminus, the sequence of SEQ ID NO: 3527 operatively linked to the sequence of SEQ ID NO: 3528.

[1152] In some embodiments, a sequence having at least 50%, 55%, 60%, 65%, 70%, 75%, 80%, 85%, 90%, 95%, 97%, 98%, 99%, 99.5%, 99.6%, 99.7%, 99.8%, or 99.9% sequence identity to the sequence of SEQ ID NO: 2191 is operatively linked to a sequence having at least 50%, 55%, 60%, 65%, 70%, 75%, 80%, 85%, 90%, 95%, 97%, 98%, 99%, 99.5%, 99.6%, 99.7%, 99.8%, or 99.9% sequence identity to the sequence of SEQ ID NO: 3533 via a sequence having at least 50%, 55%, 60%, 65%, 70%, 75%, 80%, 85%, 90%, 95%, 97%, 98%, 99%, 99.5%, 99.6%, 99.7%, 99.8%, or 99.9% sequence identity to the sequence of SEQ ID NO: 3308, or a combination thereof.

[1153] In some embodiments, the sequence of SEQ ID NO: 2191 is operatively linked to the sequence of SEQ ID NO: 3533 via the sequence of SEQ ID NO: 3308, or a combination thereof.

[1154] In some embodiments, the first polypeptide chain further comprises a sequence having at least 50%, 55%, 60%, 65%, 70%, 75%, 80%, 85%, 90%, 95%, 97%, 98%, 99%, 99.5%, 99.6%, 99.7%, 99.8%, or 99.9% sequence identity to the sequence of SEQ ID NO: 3547 operatively linked to a sequence having at least 50%, 55%, 60%, 65%, 70%, 75%, 80%, 85%, 90%, 95%, 97%, 98%, 99%, 99.5%, 99.6%, 99.7%, 99.8%, or 99.9% sequence identity to the sequence of SEQ ID NO: 3531, the second polypeptide chain further comprises a sequence having at least 50%, 55%, 60%, 65%, 70%, 75%, 80%, 85%, 90%, 95%, 97%, 98%, 99%, 99.5%, 99.6%, 99.7%, 99.8%, or 99.9% sequence identity to the sequence of SEQ ID NO: 3534 operatively linked to a sequence having at least 50%, 55%, 60%, 65%, 70%, 75%, 80%, 85%, 90%, 95%, 97%, 98%, 99%, 99.5%, 99.6%, 99.7%, 99.8%, or 99.9% sequence identity to the sequence of SEQ ID NO: 3533, or a combination thereof.

[1155] In some embodiments, the first polypeptide chain further comprises the sequence of SEQ ID NO: 3547 operatively linked to the sequence of SEQ ID NO: 3531, the second polypeptide chain further comprises the sequence of SEQ ID NO: 3534 operatively linked to the sequence of SEQ ID NO: 3533, or a combination thereof.

[1156] In some embodiments, the multifunctional polypeptide molecule comprises: (i) a first polypeptide chain comprising a sequence having at least 50%, 55%, 60%, 65%, 70%, 75%, 80%, 85%, 90%, 95%, 97%, 98%, 99%, 99.5%, 99.6%, 99.7%, 99.8%, or 99.9% sequence identity to the sequence of SEQ ID NO: 3529 or the sequence of SEQ ID NO: 3548; (ii) a second polypeptide chain comprising a sequence having at least 50%, 55%, 60%, 65%, 70%, 75%, 80%, 85%, 90%, 95%, 97%, 98%, 99%, 99.5%, 99.6%, 99.7%, 99.8%, or 99.9% sequence identity to the sequence of SEQ ID NO: 3532 or the sequence of SEQ ID NO: 3549; and (iii) a third polypeptide chain comprising a sequence having at least 50%, 55%, 60%, 65%, 70%, 75%, 80%, 85%, 90%, 95%, 97%, 98%, 99%, 99.5%, 99.6%, 99.7%, 99.8%, or 99.9% sequence identity to the sequence of SEQ ID NO: 3526.

[1157] In some embodiments, the multifunctional polypeptide molecule comprises: (i) a first polypeptide chain comprising the sequence of SEQ ID NO. 3529 or the sequence of SEQ ID NO: 3548; (ii) a second polypeptide chain comprising the sequence of SEQ ID NO: 3532 or the sequence of SEQ ID NO: 3549; and (iii) a third polypeptide chain comprising to the sequence of SEQ ID NO: 3526.

[1158] In some embodiments, the multifunctional polypeptide molecule comprises: (i) a first polypeptide chain comprising a sequence having at least 50%, 55%, 60%, 65%, 70%, 75%, 80%, 85%, 90%, 95%, 97%, 98%, 99%, 99.5%, 99.6%, 99.7%, 99.8%, or 99.9% sequence identity to the sequence of SEQ ID NO: 1346, and a sequence having at least 50%, 55%, 60%, 65%, 70%, 75%, 80%, 85%, 90%, 95%, 97%, 98%, 99%. 99.5%, 99.6%, 99.7%, 99.8%, or 99.9% sequence identity to the sequence of SEQ ID NO: 3649; (ii) a second polypeptide chain comprising a sequence having at least 50%, 55%, 60%, 65%, 70%, 75%, 80%, 85%, 90%, 95%, 97%, 98%, 99%, 99.5%, 99.6%, 99.7%, 99.8%, or 99.9% sequence identity to the sequence of SEQ ID NO: 3540, and a sequence having at least 50%, 55%, 60%, 65%, 70%, 75%, 80%, 85%, 90%, 95%, 97%, 98%, 99%, 99.5%, 99.6%, 99.7%, 99.8%, or 99.9% sequence identity to the sequence of SEQ ID NO: 3648; and (iii) a third polypeptide chain comprising a sequence having at least 50%, 55%, 60%, 65%, 70%, 75%, 80%, 85%, 90%, 95%, 97%, 98%, 99%, 99.5%, 99.6%, 99.7%, 99.8%, or 99.9% sequence identity to the sequence of SEQ ID NO: 1349, and a sequence having at least 50%, 55%, 60%, 65%, 70%, 75%, 80%, 85%, 90%, 95%, 97%, 98%, 99%, 99.5%, 99.6%, 99.7%, 99.8%, or 99.9% sequence identity to the sequence of SEQ ID NO: 3644.

[1159] In some embodiments, the multifunctional polypeptide molecule comprises: (i) a first polypeptide chain comprising the sequence of SEQ ID NO: 1346, and the sequence of SEQ ID NO: 3649; (ii) a second polypeptide chain comprising the sequence of SEQ ID NO: 3540, and the sequence of SEQ ID NO: 3648; and (iii) a third polypeptide chain comprising the sequence of SEQ ID NO: 1349, and the sequence of SEQ ID NO: 3644.

[1160] In some embodiments, the multifunctional polypeptide molecule comprises: (i) a first polypeptide chain comprising, from the N-terminus to the C-terminus, a sequence having at least 50%, 55%, 60%, 65%, 70%, 75%, 80%, 85%, 90%, 95%, 97%, 98%, 99%, 99.5%, 99.6%, 99.7%, 99.8%, or 99.9% sequence identity to the sequence of SEQ ID NO: 1346 operatively linked to a sequence having at least 50%, 55%, 60%, 65%, 70%, 75%, 80%, 85%, 90%, 95%, 97%, 98%, 99%, 99.5%, 99.6%, 99.7%, 99.8%, or 99.9% sequence identity to the sequence of SEQ ID NO: 3649; (ii) a second polypeptide chain comprising, from the N-terminus to the C-terminus, a sequence having at least 50%, 55%, 60%, 65%, 70%, 75%, 80%, 85%, 90%, 95%, 97%, 98%, 99%, 99.5%, 99.6%, 99.7%, 99.8%, or 99.9% sequence identity to the sequence of SEQ ID NO: 3540 operatively linked to a sequence having at least 50%, 55%, 60%, 65%, 70%, 75%, 80%, 85%, 90%, 95%, 97%, 98%, 99%, 99.5%, 99.6%, 99.7%, 99.8%, or 99.9% sequence identity to the sequence of SEQ ID NO: 3648; and (iii) a third polypeptide chain comprising, from the N-terminus to the C-terminus, a sequence having at least 50%, 55%, 60%, 65%, 70%, 75%, 80%, 85%, 90%, 95%, 97%, 98%, 99%, 99.5%, 99.6%, 99.7%, 99.8%, or 99.9% sequence identity to the sequence of SEQ ID NO: 1349 operatively linked to a sequence having at least 50%, 55%, 60%, 65%, 70%, 75%, 80%, 85%, 90%, 95%, 97%, 98%, 99%, 99.5%, 99.6%, 99.7%, 99.8%, or 99.9% sequence identity to the sequence of SEQ ID NO: 3644.

[1161] In some embodiments, the multifunctional polypeptide molecule comprises: (i) a first polypeptide chain comprising, from the N-terminus to the C-terminus, the sequence of SEQ ID NO: 1346 operatively linked to the sequence of SEQ ID NO: 3649; (ii) a second polypeptide chain comprising, from the N-terminus to the C-terminus, the sequence of SEQ ID NO: 3540 operatively linked to the sequence of SEQ ID NO: 3648; and (iii) a third polypeptide chain comprising, from the N-terminus to the C-terminus, the sequence of SEQ ID NO: 1349 operatively linked to the sequence of SEQ ID NO: 3644.

[1162] In some embodiments, a sequence having at least 50%, 55%, 60%, 65%, 70%, 75%, 80%, 85%, 90%, 95%, 97%, 98%, 99%, 99.5%, 99.6%, 99.7%, 99.8%, or 99.9% sequence identity to the sequence of SEQ ID NO: 3540 is operatively linked to a sequence having at least 50%, 55%, 60%, 65%, 70%, 75%, 80%, 85%, 90%, 95%, 97%, 98%, 99%, 99.5%, 99.6%, 99.7%, 99.8%, or 99.9% sequence identity to the sequence of SEQ ID NO: 3648 via a sequence having at least 50%, 55%, 60%, 65%, 70%, 75%, 80%, 85%, 90%, 95%, 97%, 98%, 99%, 99.5%, 99.6%, 99.7%, 99.8%, or 99.9% sequence identity to the sequence of SEQ ID NO: 3308, or a combination thereof.

[1163] In some embodiments, the sequence of SEQ ID NO: 3540 is operatively linked to the sequence of SEQ ID NO: 3648 via the sequence of SEQ ID NO: 3308, or a combination thereof.

[1164] In some embodiments, the multifunctional polypeptide molecule comprises: (i) a first polypeptide chain comprising a sequence having at least 50%, 55%, 60%, 65%, 70%, 75%, 80%, 85%, 90%, 95%, 97%, 98%, 99%, 99.5%, 99.6%, 99.7%, 99.8%, or 99.9% sequence identity to the sequence of SEQ ID NO: 3517; (ii) a second polypeptide chain comprising a sequence having at least 50%, 55%, 60%, 65%, 70%, 75%, 80%, 85%, 90%, 95%, 97%, 98%, 99%, 99.5%, 99.6%. 99.7%, 99.8%, or 99.9% sequence identity to the sequence of SEQ ID NO: 3539; and (iii) a third polypeptide chain comprising a sequence having at least 50%, 55%, 60%, 65%, 70%, 75%, 80%, 85%, 90%, 95%, 97%, 98%, 99%, 99.5%, 99.6%, 99.7%, 99.8%, or 99.9% sequence identity to the sequence of SEQ ID NO: 3518.

[1165] In some embodiments, the multifunctional polypeptide molecule comprises: (i) a first polypeptide chain comprising the sequence of SEQ ID NO: 3517; (ii) a second polypeptide chain comprising the sequence of SEQ ID NO: 3539; and (iii) a third polypeptide chain comprising to the sequence of SEQ ID NO: 3518.

[1166] In some embodiments, the multifunctional polypeptide molecule comprises: (i) a first polypeptide chain comprising a sequence having at least 50%, 55%, 60%, 65%, 70%, 75%, 80%, 85%, 90%, 95%, 97%, 98%, 99%, 99.5%, 99.6%, 99.7%, 99.8%, or 99.9% sequence identity to the sequence of SEQ ID NO: 1346, and a sequence having at least 50%, 55%, 60%, 65%, 70%, 75%, 80%, 85%, 90%, 95%, 97%, 98%, 99%, 99.5%, 99.6%, 99.7%, 99.8%, or 99.9% sequence identity to the sequence of SEQ ID NO: 3649; (ii) a second polypeptide chain comprising a sequence having at least 50%, 55%, 60%, 65%, 70%, 75%, 80%, 85%, 90%, 95%, 97%, 98%, 99%, 99.5%, 99.6%, 99.7%, 99.8%, or 99.9% sequence identity to the sequence of SEQ ID NO: 3542, and a sequence having at least 50%, 55%, 60%, 65%, 70%, 75%, 80%, 85%, 90%, 95%, 97%, 98%, 99%, 99.5%, 99.6%, 99.7%, 99.8%, or 99.9% sequence identity to the sequence of SEQ ID NO: 3648, and (iii) a third polypeptide chain comprising a sequence having at least 50%, 55%, 60%, 65%, 70%, 75%, 80%, 85%, 90%, 95%, 97%, 98%, 99%, 99.5%, 99.6%, 99.7%, 99.8%, or 99.9% sequence identity to the sequence of SEQ ID NO: 1349, and a sequence having at least 50%, 55%, 60%, 65%, 70%, 75%, 80%, 85%, 90%, 95%, 97%, 98%, 99%, 99.5%, 99.6%, 99.7%, 99.8%, or 99.9% sequence identity to the sequence of SEQ ID NO: 3644.

[1167] In some embodiments, the multifunctional polypeptide molecule comprises: (i) a first polypeptide chain comprising the sequence of SEQ ID NO: 1346, and the sequence of SEQ ID NO: 3649; (ii) a second polypeptide chain comprising the sequence of SEQ ID NO. 3542, and the sequence of SEQ ID NO: 3648; and (iii) a third polypeptide chain comprising the sequence of SEQ ID NO: 1349, and the sequence of SEQ ID NO: 3644.

[1168] In some embodiments, the multifunctional polypeptide molecule comprises: (i) a first polypeptide chain comprising, from the N-terminus to the C-terminus, a sequence having at least 50%, 55%, 60%, 65%, 70%, 75%, 80%, 85%, 90%, 95%, 97%, 98%, 99%, 99.5%, 99.6%, 99.7%, 99.8%, or 99.9% sequence identity to the sequence of SEQ ID NO: 1346 operatively linked to a sequence having at least 50%, 55%, 60%, 65%, 70%, 75%, 80%, 85%, 90%, 95%, 97%, 98%, 99%, 99.5%, 99.6%, 99.7%, 99.8%, or 99.9% sequence identity to the sequence of SEQ ID NO: 3649; (ii) a second polypeptide chain comprising, from the N-terminus to the C-terminus, a sequence having at least 50%, 55%, 60%, 65%, 70%, 75%, 80%, 85%, 90%, 95%, 97%, 98%, 99%, 99.5%, 99.6%, 99.7%, 99.8%, or 99.9% sequence identity to the sequence of SEQ ID NO: 3542 operatively linked to a sequence having at least 50%, 55%, 60%, 65%, 70%, 75%, 80%, 85%, 90%, 95%, 97%, 98%, 99%, 99.5%, 99.6%, 99.7%, 99.8%, or 99.9% sequence identity to the sequence of SEQ ID NO: 3648; and (iii) a third polypeptide chain comprising, from the N-terminus to the C-terminus, a sequence having at least 50%, 55%, 60%, 65%, 70%, 75%, 80%, 85%, 90%, 95%, 97%, 98%, 99%, 99.5%, 99.6%, 99.7%, 99.8%, or 99.9% sequence identity to the sequence of SEQ ID NO: 1349 operatively linked to a sequence having at least 50%, 55%, 60%, 65%, 70%, 75%, 80%, 85%, 90%, 95%, 97%, 98%, 99%, 99.5%, 99.6%, 99.7%, 99.8%, or 99.9% sequence identity to the sequence of SEQ ID NO: 3644.

[1169] In some embodiments, the multifunctional polypeptide molecule comprises: (i) a first polypeptide chain comprising, from the N-terminus to the C-terminus, the sequence of SEQ ID NO: 1346 operatively linked to the sequence of SEQ ID NO: 3649; (ii) a second polypeptide chain comprising, from the N-terminus to the C-terminus, the sequence of SEQ ID NO: 3542 operatively linked to the sequence of SEQ ID NO: 3648; and (iii) a third polypeptide chain comprising, from the N-terminus to the C-terminus, the sequence of SEQ ID NO: 1349 operatively linked to the sequence of SEQ ID NO: 3644.

[1170] In some embodiments, the IL-12 molecule or a functional fragment or a functional variant thereof comprises a sequence having at least 50%, 55%, 60%, 65%, 70%, 75%, 80%, 85%, 90%, 95%, 97%, 98%, 99%, 99.5%, 99.6%, 99.7%, 99.8%, or 99.9% sequence identity to the sequence of SEQ ID NO: 3543 and a sequence having at least 50%, 55%, 60%, 65%, 70%, 75%, 80%, 85%, 90%, 95%, 97%, 98%, 99%, 99.5%. 99.6%, 99.7%, 99.8%, or 99.9% sequence identity to the sequence of SEQ ID NO: 3545.

[1171] In some embodiments, the IL-12 molecule or a functional fragment or a functional variant thereof comprises the sequence of SEQ ID NO: 3543 and the sequence of SEQ ID NO: 3545.

[1172] In some embodiments, the IL-12 molecule or a functional fragment or a functional variant thereof comprises, from the N-terminus to the C-terminus, a sequence having at least 50%, 55%, 60%, 65%, 70%, 75%, 80%, 85%, 90%, 95%, 97%, 98%, 99%, 99.5%, 99.6%, 99.7%, 99.8%, or 99.9% sequence identity to the sequence of SEQ ID NO: 3543 operatively linked to a sequence having at least 50%, 55%, 60%, 65%, 70%, 75%, 80%, 85%, 90%, 95%, 97%, 98%, 99%, 99.5%, 99.6%, 99.7%, 99.8%, or 99.9% sequence identity to the sequence of SEQ ID NO:3545.

[1173] In some embodiments, the IL-12 molecule or a functional fragment or a functional variant thereof comprises, from the N-terminus to the C-terminus, the sequence of SEQ ID NO: 3543 operatively linked to the sequence of SEQ ID NO:3545.

[1174] In some embodiments, a sequence having at least 50%, 55%, 60%, 65%, 70%, 75%, 80%, 85%, 90%, 95%, 97%, 98%, 99%, 99.5%, 99.6%, 99.7%, 99.8%, or 99.9% sequence identity to the sequence of SEQ ID NO: 3543 is operatively linked to a sequence having at least 50%, 55%, 60%, 65%, 70%, 75%, 80%, 85%, 90%, 95%, 97%, 98%, 99%, 99.5%, 99.6%, 99.7%, 99.8%, or 99.9% sequence identity to the sequence of SEQ ID NO: 3545 via a sequence having at least 50%, 55%, 60%, 65%, 70%, 75%, 80%, 85%, 90%, 95%, 97%, 98%, 99%, 99.5%, 99.6%, 99.7%, 99.8%, or 99.9% sequence identity to the sequence of SEQ ID NO: 3544, a sequence having at least 50%, 55%, 60%, 65%, 70%, 75%, 80%, 85%, 90%, 95%, 97%, 98%, 99%, 99.5%, 99.6%, 99.7%, 99.8%, or 99.9% sequence identity to the sequence of SEQ ID NO: 3545 is operatively linked to a sequence having at least 50%, 55%, 60%, 65%, 70%, 75%, 80%, 85%, 90%, 95%, 97%, 98%, 99%, 99.5%, 99.6%, 99.7%, 99.8%, or 99.9% sequence identity to the sequence of SEQ ID NO: 3648 via a sequence having at least 50%, 55%, 60%, 65%, 70%, 75%, 80%, 85%, 90%, 95%, 97%, 98%, 99%, 99.5%, 99.6%, 99.7%, 99.8%, or 99.9% sequence identity to the sequence of SEQ ID NO: 3308, or a combination thereof.

[1175] In some embodiments, the sequence of SEQ ID NO: 3543 is operatively linked to the sequence of SEQ ID NO: 3545 via the sequence of SEQ ID NO: 3544, the sequence of SEQ ID NO: 3545 is operatively linked to the sequence of SEQ ID NO: 3648 via the sequence of SEQ ID NO: 3308, or a combination thereof.

[1176] In some embodiments, the multifunctional polypeptide molecule comprises: (i) a first polypeptide chain comprising a sequence having at least 50%, 55%, 60%, 65%, 70%, 75%, 80%, 85%, 90%, 95%, 97%, 98%, 99%, 99.5%, 99.6%, 99.7%, 99.8%, or 99.9% sequence identity to the sequence of SEQ ID NO: 3517; (ii) a second polypeptide chain comprising a sequence having at least 50%, 55%, 60%, 65%, 70%, 75%, 80%, 85%, 90%, 95%, 97%, 98%, 99%, 99.5%, 99.6%, 99.7%, 99.8%, or 99.9% sequence identity to the sequence of SEQ ID NO: 3541; and (iii) a third polypeptide chain comprising a sequence having at least 50%, 55%, 60%, 65%, 70%, 75%, 80%, 85%, 90%, 95%, 97%, 98%, 99%, 99.5%, 99.6%, 99.7%, 99.8%, or 99.9% sequence identity to the sequence of SEQ ID NO: 3518.

[1177] In some embodiments, the multifunctional polypeptide molecule comprises: (i) a first polypeptide chain comprising the sequence of SEQ ID NO: 3517; (ii) a second polypeptide chain comprising the sequence of SEQ ID NO: 3541; and (iii) a third polypeptide chain comprising to the sequence of SEQ ID NO: 3518.

[1178] In some embodiments, the multifunctional polypeptide molecule comprises: (i) a first polypeptide chain comprising a sequence having at least 50%, 55%, 60%, 65%, 70%, 75%, 80%, 85%, 90%, 95%, 97%, 98%, 99%, 99.5%, 99.6%, 99.7%, 99.8%, or 99.9% sequence identity to the sequence of SEQ ID NO: 1346, and a sequence having at least 50%, 55%, 60%, 65%, 70%, 75%, 80%, 85%, 90%, 95%, 97%, 98%, 99%, 99.5%, 99.6%, 99.7%, 99.8%, or 99.9% sequence identity to the sequence of SEQ ID NO: 3649; (ii) a second polypeptide chain comprising a sequence having at least 50%, 55%, 60%, 65%, 70%, 75%, 80%, 85%, 90%, 95%, 97%, 98%, 99%, 99.5%, 99.6%, 99.7%, 99.8%, or 99.9% sequence identity to the sequence of SEQ ID NO: 3540, and a sequence having at least 50%, 55%, 60%, 65%, 70%, 75%, 80%, 85%, 90%, 95%, 97%, 98%, 99%, 99.5%, 99.6%, 99.7%, 99.8%, or 99.9% sequence identity to the sequence of SEQ ID NO: 3648; and (iii) a third polypeptide chain comprising a sequence having at least 50%, 55%, 60%, 65%, 70%, 75%, 80%, 85%, 90%, 95%, 97%, 98%, 99%, 99.5%, 99.6%, 99.7%, 99.8%, or 99.9% sequence identity to the sequence of SEQ ID NO: 1349, and a sequence having at least 50%, 55%, 60%, 65%, 70%, 75%, 80%, 85%, 90%, 95%, 97%, 98%, 99%, 99.5%, 99.6%, 99.7%, 99.8%, or 99.9% sequence identity to the sequence of SEQ ID NO: 3644.

[1179] In some embodiments, the multifunctional polypeptide molecule comprises: (i) a first polypeptide chain comprising the sequence of SEQ ID NO: 1346, and the sequence of SEQ ID NO: 3649; (ii) a second polypeptide chain comprising the sequence of SEQ ID NO: 2193, and the sequence of SEQ ID NO: 3648; and (iii) a third polypeptide chain comprising the sequence of SEQ ID NO: 1349, and the sequence of SEQ ID NO: 3644.

[1180] In some embodiments, the multifunctional polypeptide molecule comprises: (i) a first polypeptide chain comprising, from the N-terminus to the C-terminus, a sequence having at least 50%, 55%, 60%, 65%, 70%, 75%, 80%, 85%, 90%, 95%, 97%, 98%, 99%, 99.5%, 99.6%, 99.7%, 99.8%, or 99.9% sequence identity to the sequence of SEQ ID NO: 1346 operatively linked to a sequence having at least 50%, 55%, 60%, 65%, 70%, 75%, 80%, 85%, 90%, 95%, 97%, 98%, 99%, 99.5%, 99.6%, 99.7%, 99.8%, or 99.9% sequence identity to the sequence of SEQ ID NO: 3649; (ii) a second polypeptide chain comprising, from the N-terminus to the C-terminus, a sequence having at least 50%, 55%, 60%, 65%, 70%, 75%, 80%, 85%, 90%, 95%, 97%, 98%, 99%, 99.5%, 99.6%, 99.7%, 99.8%, or 99.9% sequence identity to the sequence of SEQ ID NO: 2193 operatively linked to a sequence having at least 50%, 55%, 60%, 65%, 70%, 75%, 80%, 85%, 90%, 95%, 97%, 98%, 99%, 99.5%, 99.6%, 99.7%, 99.8%, or 99.9% sequence identity to the sequence of SEQ ID NO: 3648; and (iii) a third polypeptide chain comprising, from the N-terminus to the C-terminus, a sequence having at least 50%, 55%, 60%, 65%, 70%, 75%, 80%, 85%, 90%, 95%, 97%, 98%, 99%, 99.5%, 99.6%, 99.7%, 99.8%, or 99.9% sequence identity to the sequence of SEQ ID NO. 1349 operatively linked to a sequence having at least 50%, 55%, 60%, 65%, 70%, 75%, 80%, 85%, 90%, 95%, 97%, 98%, 99%, 99.5%, 99.6%, 99.7%, 99.8%, or 99.9% sequence identity to the sequence of SEQ ID NO: 3644.

[1181] In some embodiments, the multifunctional polypeptide molecule comprises: (i) a first polypeptide chain comprising, from the N-terminus to the C-terminus, the sequence of SEQ ID NO: 1346 operatively linked to the sequence of SEQ ID NO: 3649; (ii) a second polypeptide chain comprising, from the N-terminus to the C-terminus, the sequence of SEQ ID NO: 2193 operatively linked to the sequence of SEQ ID NO: 3648; and (iii) a third polypeptide chain comprising, from the N-terminus to the C-terminus, the sequence of SEQ ID NO: 1349 operatively linked to the sequence of SEQ ID NO: 3644.

[1182] In some embodiments, a sequence having at least 50%, 55%, 60%, 65%, 70%, 75%, 80%, 85%, 90%, 95%, 97%, 98%, 99%, 99.5%, 99.6%, 99.7%, 99.8%, or 99.9% sequence identity to the sequence of SEQ ID NO: 2193 is operatively linked to a sequence having at least 50%, 55%, 60%, 65%, 70%, 75%, 80%, 85%, 90%, 95%, 97%, 98%, 99%, 99.5%, 99.6%, 99.7%, 99.8%, or 99.9% sequence identity to the sequence of SEQ ID NO: 3648 via a sequence having at least 50%, 55%, 60%, 65%, 70%, 75%, 80%, 85%, 90%, 95%, 97%, 98%, 99%, 99.5%, 99.6%, 99.7%, 99.8%, or 99.9% sequence identity to the sequence of SEQ ID NO: 3308.

[1183] In some embodiments, the sequence of SEQ ID NO: 2193 is operatively linked to the sequence of SEQ ID NO: 3648 via the sequence of SEQ ID NO: 3308.

[1184] In some embodiments, the multifunctional polypeptide molecule comprises: (i) a first polypeptide chain comprising a sequence having at least 50%, 55%, 60%, 65%, 70%, 75%, 80%, 85%, 90%, 95%, 97%, 98%, 99%, 99.5%, 99.6%, 99.7%, 99.8%, or 99.9% sequence identity to the sequence of SEQ ID NO: 3517; (ii) a second polypeptide chain comprising a sequence having at least 50%, 55%, 60%, 65%, 70%, 75%, 80%, 85%, 90%, 95%, 97%, 98%, 99%, 99.5%, 99.6%, 99.7%, 99.8%, or 99.9% sequence identity to the sequence of SEQ ID NO: 3546; and (iii) a third polypeptide chain comprising a sequence having at least 50%, 55%, 60%, 65%, 70%, 75%, 80%, 85%, 90%, 95%, 97%, 98%, 99%, 99.5%, 99.6%, 99.7%, 99.8%, or 99.9% sequence identity to the sequence of SEQ ID NO: 3518.

[1185] In some embodiments, the multifunctional polypeptide molecule comprises: (i) a first polypeptide chain comprising the sequence of SEQ ID NO: 3517; (ii) a second polypeptide chain comprising the sequence of SEQ ID NO: 3546; and (iii) a third polypeptide chain comprising to the sequence of SEQ ID NO: 3518.

[1186] In some embodiments, the multifunctional polypeptide molecule comprises: (i) a first polypeptide chain comprising a sequence having at least 50%, 55%, 60%, 65%, 70%, 75%, 80%, 85%, 90%, 95%, 97%, 98%, 99%, 99.5%, 99.6%, 99.7%, 99.8%, or 99.9% sequence identity to the sequence of SEQ ID NO: 3530 and a sequence having at least 50%, 55%, 60%, 65%, 70%, 75%, 80%, 85%, 90%, 95%, 97%, 98%, 99%, 99.5%, 99.6%, 99.7%, 99.8%, or 99.9% sequence identity to the sequence of SEQ ID NO: 3537; and (ii) a second polypeptide chain comprising a sequence having at least 50%, 55%, 60%, 65%, 70%, 75%, 80%, 85%, 90%, 95%, 97%, 98%, 99%, 99.5%, 99.6%, 99.7%, 99.8%, or 99.9% sequence identity to the sequence of SEQ ID NO: 3527, a sequence having at least 50%, 55%, 60%, 65%, 70%, 75%, 80%, 85%, 90%, 95%, 97%, 98%, 99%, 99.5%, 99.6%, 99.7%, 99.8%, or 99.9% sequence identity to the sequence of SEQ ID NO: 3528, and a sequence having at least 50%, 55%, 60%, 65%, 70%, 75%, 80%, 85%, 90%, 95%, 97%, 98%, 99%, 99.5%, 99.6%, 99.7%, 99.8%, or 99.9% sequence identity to the sequence of SEQ ID NO: 2191.

[1187] In some embodiments, the multifunctional polypeptide molecule comprises: (i) a first polypeptide chain comprising the sequence of SEQ ID NO. 3530 and the sequence of SEQ ID NO: 3537; and (ii) a second polypeptide chain comprising the sequence of SEQ ID NO: 3527, the sequence of SEQ ID NO: 3528, and the sequence of SEQ ID NO: 2191.

[1188] In some embodiments, the multifunctional polypeptide molecule comprises: (i) a first polypeptide chain comprising, from the N-terminus to the C-terminus, a sequence having at least 50%, 55%, 60%, 65%, 70%, 75%, 80%, 85%, 90%, 95%, 97%, 98%, 99%, 99.5%, 99.6%, 99.7%, 99.8%, or 99.9% sequence identity to the sequence of SEQ ID NO: 3530 operatively linked to a sequence having at least 50%, 55%, 60%, 65%, 70%, 75%, 80%, 85%, 90%, 95%, 97%, 98%, 99%, 99.5%, 99.6%, 99.7%, 99.8%, or 99.9% sequence identity to the sequence of SEQ ID NO: 3537; and (ii) a second polypeptide chain comprising, from the N-terminus to the C-terminus, a sequence having at least 50%, 55%, 60%, 65%, 70%, 75%, 80%, 85%, 90%, 95%, 97%, 98%, 99%, 99.5%, 99.6%, 99.7%, 99.8%, or 99.9% sequence identity to the sequence of SEQ ID NO: 3527 operatively linked to a sequence having at least 50%, 55%, 60%, 65%, 70%, 75%, 80%, 85%, 90%, 95%, 97%, 98%, 99%, 99.5%, 99.6%, 99.7%, 99.8%, or 99.9% sequence identity to the sequence of SEQ ID NO: 3528 operatively linked to a sequence having at least 50%, 55%, 60%, 65%, 70%, 75%, 80%, 85%, 90%, 95%, 97%, 98%, 99%, 99.5%, 99.6%, 99.7%, 99.8%, or 99.9% sequence identity to the sequence of SEQ ID NO: 2191.

[1189] In some embodiments, the multifunctional polypeptide molecule comprises: (i) a first polypeptide chain comprising, from the N-terminus to the C-terminus, the sequence of SEQ ID NO: 3530 operatively linked to the sequence of SEQ ID NO: 3537; and (ii) a second polypeptide chain comprising, from the N-terminus to the C-terminus, the sequence of SEQ ID NO: 3527 operatively linked to the sequence of SEQ ID NO: 3528 operatively linked to the sequence of SEQ ID NO: 2191.

[1190] In some embodiments, a sequence having at least 50%, 55%, 60%, 65%, 70%, 75%, 80%, 85%, 90%, 95%, 97%, 98%, 99%, 99.5%, 99.6%, 99.7%, 99.8%, or 99.9% sequence identity to the sequence of SEQ ID NO: 3528 is operatively linked to a sequence having at least 50%, 55%, 60%, 65%, 70%, 75%, 80%, 85%, 90%, 95%, 97%, 98%, 99%, 99.5%, 99.6%, 99.7%, 99.8%, or 99.9% sequence identity to the sequence of SEQ ID NO: 2191 via a sequence having at least 50%, 55%, 60%, 65%, 70%, 75%, 80%, 85%, 90%, 95%, 97%, 98%, 99%, 99.5%, 99.6%, 99.7%, 99.8%, or 99.9% sequence identity to the sequence of SEQ ID NO: 3309.

[1191] In some embodiments, the sequence of SEQ ID NO: 3528 is operatively linked to the sequence of SEQ ID NO: 2191 via the sequence of SEQ ID NO: 3309.

[1192] In some embodiments, the multifunctional polypeptide molecule comprises two first polypeptide chains and two second polypeptide chains.

[1193] In some embodiments, the multifunctional polypeptide molecule comprises: (i) a first polypeptide chain comprising a sequence having at least 50%, 55%, 60%, 65%, 70%, 75%, 80%, 85%, 90%, 95%, 97%, 98%, 99%, 99.5%, 99.6%, 99.7%, 99.8%, or 99.9% sequence identity to the sequence of SEQ ID NO: 3536; and (ii) a second polypeptide chain comprising a sequence having at least 50%, 55%, 60%, 65%, 70%, 75%, 80%, 85%, 90%, 95%, 97%, 98%, 99%, 99.5%, 99.6%, 99.7%, 99.8%, or 99.9% sequence identity to the sequence of SEQ ID NO: 3535.

[1194] In some embodiments, the multifunctional polypeptide molecule comprises: (i) a first polypeptide chain comprising the sequence of SEQ ID NO: 3536; and (ii) a second polypeptide chain comprising the sequence of SEQ ID NO: 3535.

[1195] In some embodiments, the multifunctional polypeptide molecule comprises: (i) a first polypeptide chain comprising one or more components as listed in Table 21; and (ii) a second polypeptide chain comprising one or more components as listed in Table 21. In some embodiments, the multifunctional polypeptide molecule further comprises: (i) a third polypeptide chain comprising one or more components as listed in Table 21; and (ii) a fourth polypeptide chain comprising one or more components as listed in Table 21.

[1196] In some embodiments, the multifunctional polypeptide molecule comprises: (i) a first polypeptide chain comprising one or more components comprising a sequence having at least 50%, 55%, 60%, 65%, 70%, 75%, 80%, 85%, 90%, 95%, 97%, 98%, 99%, 99.5%, 99.6%, 99.7%, 99.8%, or 99.9% sequence identity to any one of the component sequences as listed in Table 21; and (ii) a second polypeptide chain comprising one or more components comprising a sequence having at least 50%, 55%, 60%, 65%, 70%, 75%, 80%, 85%, 90%, 95%, 97%, 98%, 99%, 99.5%, 99.6%, 99.7%, 99.8%, or 99.9% sequence identity to any one of the component sequences as listed in Table 21. In some embodiments, the multifunctional polypeptide molecule further comprises: (i) a third polypeptide chain comprising one or more components comprising a sequence having at least 50%, 55%, 60%, 65%, 70%, 75%, 80%, 85%, 90%, 95%, 97%, 98%, 99%, 99.5%, 99.6%. 99.7%, 99.8%, or 99.9% sequence identity to any one of the component sequences as listed in Table 21; and (ii) a fourth polypeptide chain comprising one or more components comprising a sequence having at least 50%, 55%, 60%, 65%, 70%, 75%, 80%, 85%, 90%, 95%, 97%, 98%, 99%, 99.5%, 99.6%, 99.7%, 99.8%, or 99.9% sequence identity to any one of the component sequences as listed in Table 21.

[1197] In some embodiments, the multifunctional polypeptide molecule comprises: (i) a first polypeptide chain comprising one or more component sequences as listed in Table 21; and (ii) a second polypeptide chain comprising one or more component sequences as listed in Table 21. In some embodiments, the multifunctional polypeptide molecule further comprises: (i) a third polypeptide chain comprising one or more component sequences as listed in Table 21; and (ii) a fourth polypeptide chain comprising one or more component sequences as listed in Table 21.

[1198] In some embodiments, the multifunctional polypeptide molecule comprises: (i) a first polypeptide chain comprising an amino acid sequence having at least 50%, 55%, 60%, 65%, 70%, 75%, 80%, 85%, 90%, 95%, 97%, 98%, 99%, 99.5%, 99.6%, 99.7%, 99.8%, or 99.9% sequence identity to any one of the polypeptide sequences as listed in Table 21; and (ii) a second polypeptide chain comprising an amino acid sequence having at least 50%, 55%, 60%, 65%, 70%, 75%, 80%, 85%, 90%, 95%, 97%, 98%, 99%, 99.5%, 99.6%, 99.7%, 99.8%, or 99.9% sequence identity to any one of the polypeptide sequences as listed in Table 21. In some embodiments, the multifunctional polypeptide molecule further comprises: (i) a third polypeptide chain comprising an amino acid sequence having at least 50%, 55%, 60%, 65%, 70%, 75%, 80%, 85%, 90%, 95%, 97%, 98%, 99%, 99.5%, 99.6%, 99.7%, 99.8%, or 99.9% sequence identity to any one of the polypeptide sequences as listed in Table 21; and (ii) a fourth polypeptide chain comprising an amino acid sequence having at least 50%, 55%, 60%, 65%, 70%, 75%, 80%, 85%, 90%, 95%, 97%, 98%, 99%, 99.5%, 99.6%, 99.7%, 99.8%, or 99.9% sequence identity to any one of the polypeptide sequences as listed in Table 21.

[1199] In some embodiments, the multifunctional polypeptide molecule comprises: (i) a first polypeptide chain comprising any one of the polypeptide sequences as listed in Table 21; and (ii) a second polypeptide chain comprising any one of the polypeptide sequences as listed in Table 21. In some embodiments, the multifunctional polypeptide molecule further comprises: (i) a third polypeptide chain comprising any one of the polypeptide sequences as listed in Table 21; and (ii) a fourth polypeptide chain comprising one or more comprising any one of the polypeptide sequences as listed in Table 21.

[1200] In another aspect, described herein is an antibody comprising an anti-T cell receptor beta variable chain (TCRβV) binding domain comprising: (i) a heavy chain variable region (VH) comprising a heavy chain complementarity determining region 1 (HC CDR1), a heavy chain complementarity determining region 2 (HC CDR2), and a heavy chain complementarity determining region 3 (HC CDR3) comprising an amino acid sequence having at least 50%, 55%, 60%, 65%, 70%, 75%, 80%, 85%, 90%, 95%, 97%, 98%, 99%, 99.5%. 99.6%, 99.7%, 99.8%, or 99.9% sequence identity to SEQ ID NO: 3650, SEQ ID NO: 3651, and SEQ ID NO: 5, respectively; (ii) a light chain variable region (VL) comprising a light chain complementarity determining region 1 (LC CDR1), a light chain complementarity determining region 2 (LC CDR2), and a light chain complementarity determining region 3 (LC CDR3) comprising an amino acid sequence having at least 50%, 55%, 60%, 65%, 70%, 75%, 80%, 85%, 90%, 95%, 97%, 98%, 99%, 99.5%, 99.6%, 99.7%, 99.8%, or 99.9% sequence identity to SEQ ID NO: 3655, SEQ ID NO: 3653, and SEQ ID NO: 8, respectively; or (iii) a combination thereof.

[1201] In some embodiments, the TCRβV binding domain comprising: (i) a VH comprising a HC CDR1, a HC CDR2, and a HC CDR3 comprising the amino acid sequence of SEQ ID NO: 3650, SEQ ID NO: 3651, and SEQ ID NO: 5, respectively; (ii) a VL comprising a LC CDR1, a LC CDR2, and a LC CDR3 comprising the amino acid sequence of SEQ ID NO: 3655, SEQ ID NO: 3653, and SEQ ID NO: 8, respectively; or (iii) a combination thereof.

[1202] In some embodiments, the TCRβV binding domain comprising: (i) a VH comprising an amino acid sequence having at least 50%, 55%, 60%, 65%, 70%, 75%, 80%, 85%, 90%, 95%, 97%, 98%, 99%, 99.5%, 99.6%, 99.7%, 99.8%, or 99.9% sequence identity to SEQ ID NO: 1346; (ii) a VL comprising an amino acid sequence having at least 50%, 55%, 60%, 65%, 70%, 75%, 80%, 85%, 90%, 95%, 97%, 98%, 99%, 99.5%, 99.6%, 99.7%, 99.8%, or 99.9% sequence identity to SEQ ID NO: 1349; or (iii) a combination thereof.

[1203] In some embodiments, the TCRβV binding domain comprising: (i) a VH comprising the amino acid sequence of SEQ ID NO: 1346; (ii) a VL comprising the amino acid sequence of SEQ ID NO: 1349; or (iii) a combination thereof.

[1204] In some embodiments, the antibody comprising an anti-T cell receptor beta variable chain (TCRβV) binding domain further comprises a cytokine polypeptide or a functional fragment or a functional variant thereof. In some embodiments, the cytokine polypeptide may be IL-2, IL2-C125A, IL-15, IL-7, IL-12, or IL-21. In embodiments, the cytokine polypeptide may further comprise a cytokine receptor. In some embodiments, the cytokine polypeptide may comprise IL-15 linked to a IL-15Ra. In some embodiments, the cytokine polypeptide may comprise IL-15 linked to a IL-15Ra sushi domain. In some embodiments, the cytokine polypeptide may comprise a cytokine dimer. In some embodiments, the cytokine polypeptide may comprise an IL-12 beta subunit linked to an IL-12 alpha subunit.

TABLE 1
Amino acid and nucleotide sequences for murine, chimeric and humanized antibody molecules
which bind to TCRVB 6, e.g., TCRVB 6-5. The antibody molecules include murine m.Ab Antibody A,
and humanized mAb Antibody A-H Clones A-H.1 to A-H.85. The amino acid the heavy and light
chain CDRs, and the amino acid and nucleotide sequences of the heavy and light chain variable
regions, and the heavy and light chains are shown.
Antibody A (murine), also referred to as H131, TCRVB 6-5 binder

| | | |
|---|---|---|
| SEQ ID NO: 3 | HC CDR1 (Combined) | GYSFTTYYIH |
| SEQ ID NO: 4 | HC CDR2 (Combined) | WFFPGSGNIKYNEKFKG |
| SEQ ID NO: 5 | HC CDR3 (Combined) | SYYSYDVLDY |
| SEQ ID NO: 45 | HC CDR1 (Kabat) | TYYIH |
| SEQ ID NO: 46 | HC CDR2 (Kabat) | WFFPGSGNIKYNEKFKG |
| SEQ ID NO: 47 | HC CDR3 (Kabat) | SYYSYDVLDY |
| SEQ ID NO: 48 | HC CDR1 (Chothia) | GYSFTTY |
| SEQ ID NO: 49 | HC CDR2 (Chothia) | FPGSGN |
| SEQ ID NO: 50 | HC CDR3 (Chothia) | SYYSYDVLDY |
| SEQ ID NO: 1 | VH | QVQLQQSGPELVKPGTSVKISCKASGYSFTTYYIHWVKQRPG |
| | | QGLEWIGWFFPGSGNIKYNEKFKGKATLTADTSSSTAYMQLS |
| | | SLTSEESAVYFCAGSYYSYDVLDYWGHGTTLTVSS |
| SEQ ID NO: 6 | LC CDR1 (Combined) | KASQNVGINVV |
| SEQ ID NO: 7 | LC CDR2 (Combined) | SSSHRYS |
| SEQ ID NO: 8 | LC CDR3 (Combined) | QQFKSYPLT |
| SEQ ID NO: 51 | LC CDR1 (Kabat) | KASQNVGINVV |
| SEQ ID NO: 52 | LC CDR2 (Kabat) | SSSHRYS |
| SEQ ID NO: 53 | LC CDR3 (Kabat) | QQFKSYPLT |
| SEQ ID NO: 54 | LC CDR1 (Chothia) | KASQNVGINVV |
| SEQ ID NO: 55 | LC CDR2 (Chothia) | SSSHRYS |
| SEQ ID NO: 56 | LC CDR3 (Chothia) | QQFKSYPLT |
| SEQ ID NO: 2 | VL | DILMTQSQKFMSTSLGDRVSVSCKASQNVGINVVWHQQKPG |
| | | QSPKALIYSSSHRYSGVPDRFTGSGSGTDFTLTINNVQSEDLA |
| | | EYFCQQFKSYPLTFGAGTKLELK |

Antibody A humanized (A-H antibody), TCRVB 6-5 binder
A-H.1 antibody (also referred to as BHM1709)

| | | |
|---|---|---|
| SEQ ID NO: 3 | HC CDR1 (Combined) | GYSFTTYYIH |
| SEQ ID NO: 4 | HC CDR2 (Combined) | WFFPGSGNIKYNEKFKG |
| SEQ ID NO: 5 | HC CDR3 (Combined) | SYYSYDVLDY |
| SEQ ID NO: 9 | VH | QVQLVQSGAEVKKPGSSVKVSCKASGYSFTTYYIHWVRQAP |
| | | GQGLEWMGWFFPGSGNIKYNEKFKGRVTITADTSTSTAYME |
| | | LSSLRSEDTAVYYCAGSYYSYDVLDYWGQGTTVTVSS |
| SEQ ID NO: 12 | DNA VH | CAGGTGCAGCTGGTTCAGTCTGGCGCCGAAGTGAAGAAAC |
| | | CTGGCTCCTCCGTGAAGGTGTCCTGCAAGGCTTCCGGCTAC |
| | | TCCTTCACCACCTACTACATCCACTGGGTCCGACAGGCCCC |
| | | TGGACAAGGATTGGAATGGATGGGCTGGTTCTTCCCCGGC |
| | | TCCGGCAACATCAAGTACAACGAGAAGTTCAAGGGCCGCG |
| | | TGACCATCACCGCCGACACCTCTACCTCTACCGCCTACATG |
| | | GAACTGTCCAGCCTGAGATCTGAGGACACCGCCGTGTACT |
| | | ACTGCGCCGGCTCCTACTACTCTTACGACGTGCTGGATTAC |
| | | TGGGGCCAGGGCACCACAGTGACAGTGTCCTCT |
| SEQ ID NO: 69 | VH-IgM constant delta | METDTLLLWVLLLWVPGSTGQVQLVQSGAEVKKPGSSVKVS |
| | CDC | CKASGYSFTTYYIHWVRQAPGQGLEWMGWFFPGSGNIKYNE |
| | | KFKGRVTITADTSTSTAYMELSSLRSEDTAVYYCAGSYYSYD |
| | | VLDYWGQGTTVTVSSGSASAPTLFPLVSCENSPSDTSSVAVG |
| | | CLAQDFLPDSITFSWKYKNNSDISSTRGFPSVLRGGKYAATSQ |
| | | VLLPSKDVMQGTDEHVVCKVQHPNGNKEKNVPLPVIAELPP |
| | | KVSVFVPPRDGFFGNPRKSKLICQATGFSPRQIQVSWLREGKQ |
| | | VGSGVTTDQVQAEAKESGPTTYKVTSTLTIKESDWLGQSMFT |
| | | CRVDHRGLTFQQNASSMCVPDQDTAIRVFAIPPSFASIFLTKS |
| | | TKLTCLVTDLTTYDSVTISWTRQNGEAVKTHTNISESHPNATE |
| | | SAVGEASICEDDWNSGERFTCTVTHTDLASSLKQTISRPKGVA |
| | | LHRPDVYLLPPAREQLNLRESATITCLVTGFSPADVFVQWMQ |
| | | RGQPLSPEKYVTSAPMPEPQAPGRYFAHSILTVSEEEWNTGET |
| | | YTCVVAHEALPNRVTERTVDKSTGKPTLYNVSLVMSDTAGT |
| | | CY |
| SEQ ID NO: 70 | VH-IgGA1 | METDTLLLWVLLLWVPGSTGQVQLVQSGAEVKKPGSSVKVS |
| | | CKASGYSFTTYYIHWVRQAPGQGLEWMGWFFPGSGNIKYNE |
| | | KFKGRVTITADTSTSTAYMELSSLRSEDTAVYYCAGSYYSYD |
| | | VLDYWGQGTTVTVSSASPTSPKVFPLSLCSTQPDGNVVIACL |
| | | VQGFFPQEPLSVTWSESGQGVTARNFPPSQDASGDLYTTSSQ |
| | | LTLPATQCLAGKSVTCHVKHYTNPSQDVTVPCPVPSTPPTPSP |
| | | STPPTPSPSCCHPRLSLHRPALEDLLLGSEANLTCILTGLRDAS |
| | | GVTFTWTPSSGKSAVQGPPERDLCGCYSVSSVLPGCAEPWNH |
| | | GKTFTCTAAYPESKTPLTATLSKSGNTFRPEVHLLPPPSEELAL |
| | | NELVTLTCLARGFSPKDVLVRWLQGSQELPREKYLTWASRQ |
| | | EPSQGTTTFAVTSILRVAAEDWKKGDTFSCMVGHEALPLAFT |
| | | QKTIDRLAGKPTHVNVSVVMAEVDGTCY |
| SEQ ID NO: 71 | VH-IgGA2 | METDTLLLWVLLLWVPGSTGQVQLVQSGAEVKKPGSSVKVS |
| | | CKASGYSFTTYYIHWVRQAPGQGLEWMGWFFPGSGNIKYNE |
| | | KFKGRVTITADTSTSTAYMELSSLRSEDTAVYYCAGSYYSYD |
| | | VLDYWGQGTTVTVSSASPTSPKVFPLSLDSTPQDGNVVVACL |
| | | VQGFFPQEPLSVTWSESGQNVTARNFPPSQDASGDLYTTSSQ |
| | | LTLPATQCPDGKSVTCHVKHYTNSSQDVTVPCRVPPPPPCCH |
| | | PRLSLHRPALEDLLLGSEANLTCTLTGLRDASGATFTWTPSSG |
| | | KSAVQGPPERDLCGCYSVSSVLPGCAQPWNHGETFTCTAAH |
| | | PELKTPLTANITKSGNTFRPEVHLLPPPSEELALNELVTLTCLA |
| | | RGFSPKDVLVRWLQGSQELPREKYLTWASRQEPSQGTTTYA |
| | | VTSILRVAAEDWKKGETFSCMVGHEALPLAFTQKTIDRMAG |
| | | KPTHINVSVVMAEADGTCY |
| SEQ ID NO: | Heavy chain | METDTLLLWVLLLWVPGSTGQVQLVQSGAEVKKPGSSVKVS |
| 3278 | | CKASGYSFTTYYIHWVRQAPGQGLEWMGWFFPGSGNIKYNE |
| | | KFKGRVTITADTSTSTAYMELSSLRSEDTAVYYCAGSYYSYD |
| | | VLDYWGQGTTVTVSSASTKGPSVFPLAPSSKSTSGGTAALGC |
| | | LVKDYFPEPVTVSWNSGALTSGVHTFPAVLQSSGLYSLSSVV |
| | | TVPSSSLGTQTYICNVNHKPSNTKVDKRVEPKSCDKTHTCPP |
| | | CPAPELLGGPSVFLFPPKPKDTLMISRTPEVTCVVVDVSHEDP |
| | | EVKFNWYVDGVEVHNAKTKPREEQYNSTYRVVSVLTVLHQ |
| | | DWLNGKEYKCKVSNKALPAPIEKTISKAKGQPREPQVYTLPP |
| | | SREEMTKNQVSLTCLVKQFYPSDIAVEWESNGQPENNYKTTP |
| | | PVLDSDGSFFLYSKLTVDKSRWQQGNVFSCSVMHEALHNHY |
| | | TQKSLSLSPGK |
| SEQ ID NO: 6 | LC CDR1 (Combined) | KASQNVGINVV |
| SEQ ID NO: 7 | LC CDR2 (Combined) | SSSHRYS |
| SEQ ID NO: 8 | LC CDR3 (Combined) | QQFKSYPLT |
| SEQ ID NO: 10 | VL | DIQMTQSPSFLSASVGDRVTITCKASQNVGINVVWHQQKPGK |
| | | APKALIYSSSHRYSGVPSRFSGSGSGTEFTLTISSLQPEDFATYF |
| | | CQQFKSYPLTFGQGTKLEIK |
| SEQ ID NO: 13 | DNA VL | GACATCCAGATGACCCAGTCTCCATCCTTCCTGTCCGCCTC |
| | | TGTGGGCGACAGAGTGACCATCACATGCAAGGCCTCTCAG |
| | | AACGTGGGCATCAACGTCGTGTGGCACCAGCAGAAGCCTG |
| | | GCAAGGCTCCTAAGGCTCTGATCTACTCCTCCAGCCACCG |
| | | GTACTCTGGCGTGCCCTCTAGATTTTCCGGCTCTGGCTCTG |
| | | GCACCGAGTTTACCCTGACAATCTCCAGCCTGCAGCCTGA |
| | | GGACTTCGCCACCTACTTTTGCCAGCAGTTCAAGAGCTACC |
| | | CTCTGACCTTTGGCCAGGGCACCAAGCTGGAAATCAAG |
| SEQ ID NO: 72 | VL and kappa constant | METDTLLLWVLLLWVPGSTGDIQMTQSPSFLSASVGDRVTIT |
| | region/light chain | CKASQNVGINVVWHQQKPGKAPKALIYSSSHRYSGVPSRFSG |
| | | SGSGTEFTLTISSLQPEDFATYFCQQFKSYPLTFGQGTKLEIKR |
| | | TVAAPSVFIFPPSDEQLKSGTASVVCLLNNFYPREAKVQWKV |
| | | DNALQSGNSQESVTEQDSKDSTYSLSSTLTLSKADYEKHKVY |
| | | ACEVTHQGLSSPVTKSFNRGEC |

A-H.2 antibody (also referred to as BHM1710)

| | | |
|---|---|---|
| SEQ ID NO: 3 | HC CDR1 (Combined) | GYSFTTYYIH |
| SEQ ID NO: 4 | HC CDR2 (Combined) | WFFPGSGNIKYNEKFKG |
| SEQ ID NO: 5 | HC CDR3 (Combined) | SYYSYDVLDY |
| SEQ ID NO: 9 | VH | QVQLVQSGAEVKKPGSSVKVSCKASGYSFTTYYIHWVRQAP |
| | | GQGLEWMGWFFPGSGNIKYNEKFKGRVTITADTSTSTAYME |
| | | LSSLRSEDTAVYYCAGSYYSYDVLDYWGQGTTVTVSS |
| SEQ ID NO: 12 | DNA VH | CAGGTGCAGCTGGTTCAGTCTGGCGCCGAAGTGAAGAAAC |
| | | CTGGCTCCTCCGTGAAGGTGTCCTGCAAGGCTTCCGGCTAC |
| | | TCCTTCACCACCTACTACATCCACTGGGTCCGACAGGCCCC |
| | | TGGACAAGGATTGGAATGGATGGGCTGGTTCTTCCCCGGC |
| | | TCCGGCAACATCAAGTACAACGAGAAGTTCAAGGGCCGCG |
| | | TGACCATCACCGCCGACACCTCTACCTCTACCGCCTACATG |
| | | GAACTGTCCAGCCTGAGATCTGAGGACACCGCCGTGTACT |
| | | ACTGCGCCGGCTCCTACTACTCTTACGACGTGCTGGATTAC |
| | | TGGGGCCAGGGCACCACAGTGACAGTGTCCTCT |
| SEQ ID NO: | Heavy chain | METDTLLLWVLLLWVPGSTGQVQLVQSGAEVKKPGSSVKVS |
| 3278 | | CKASGYSFTTYYIHWVRQAPGQGLEWMGWFFPGSGNIKYNE |
| | | KFKGRVTITADTSTSTAYMELSSLRSEDTAVYYCAGSYYSYD |
| | | VLDYWGQGTTVTVSSASTKGPSVFPLAPSSKSTSGGTAALGC |
| | | LVKDYFPEPVTVSWNSGALTSGVHTFPAVLQSSGLYSLSSVV |
| | | TVPSSSLGTQTYICNVNHKPSNTKVDKRVEPKSCDKTHTCPP |
| | | CPAPELLGGPSVFLFPPKPKDTLMISRTPEVTCVVVDVSHEDP |
| | | EVKFNWYVDGVEVHNAKTKPREEQYNSTYRVVSVLTVLHQ |
| | | DWLNGKEYKCKVSNKALPAPIEKTISKAKGQPREPQVYTLPP |
| | | SREEMTKNQVSLTCLVKGFYPSDIAVEWESNGQPENNYKTTP |
| | | PVLDSDGSFFLYSKLTVDKSRWQQGNVFSCSVMHEALHNHY |
| | | TOKSLSLSPGK |
| SEQ ID NO: 6 | LC CDR1 (Combined) | KASQNVGINVV |
| SEQ ID NO: 7 | LC CDR2 (Combined) | SSSHRYS |
| SEQ ID NO: 8 | LC CDR3 (Combined) | QQFKSYPLT |
| SEQ ID NO: 11 | VL | DIQMTQSPSSLSASVGDRVTITCKASQNVGINVVWHQQKPGK |
| | | VPKALIYSSSHRYSGVPSRFSGSGSGTDFTLTISSLOPEDVATY |
| | | FCQQFKSYPLTFGQGTKLEIK |
| SEQ ID NO: 14 | DNA VL | GACATCCAGATGACCCAGTCTCCATCCTCTCTGTCCGCCTC |
| | | TGTGGGCGACAGAGTGACCATCACATGCAAGGCCTCTCAG |
| | | AACGTGGGCATCAACGTCGTGTGGCACCAGCAGAAACCTG |
| | | GCAAGGTGCCCAAGGCTCTGATCTACTCCTCCAGCCACAG |
| | | ATACTCCGGCGTGCCCTCTAGATTCTCCGGCTCTGGCTCTG |
| | | GCACCGACTTTACCCTGACAATCTCCAGCCTGCAGCCTGA |
| | | GGACGTGGCCACCTACTTTTGCCAGCAGTTCAAGAGCTAC |
| | | CCTCTGACCTTTGGCCAGGGCACCAAGCTGGAAATCAAG |
| SEQ ID NO: | Light chain | METDTLLLWVLLLWVPGSTGDIQMTQSPSSLSASVGDRVTIT |
| 3279 | | CKASQNVGINVVWHQQKPGKVPKALIYSSSHRYSGVPSRFSG |
| | | SGSGTDFTLTISSLQPEDVATYFCQQFKSYPLTFGQGTKLEIKR |
| | | TVAAPSVFIFPPSDEQLKSGTASVVCLLNNFYPREAKVQWKV |
| | | DNALQSGNSQESVTEQDSKDSTYSLSSTLTLSKADYEKHKVY |
| | | ACEVTHQGLSSPVTKSFNRGEC |

A-H.3 antibody

| | | |
|---|---|---|
| SEQ ID NO: 80 | VH + VL | QVQLVQSGAEVKKPGSSVKVSCKASGTDFKLTYIHWVRQAP |
| | | GQGLEWMGRVSPGSGNTKYNEKFKGRVTITADTSTSTAYME |
| | | LSSLRSEDTAVYYCAGSYYSYDVLDYWGQGTTVTVSSGGGG |
| | | SGGGGSGGGGSGGGGSDIQMTQSPSFLSASVGDRVTITCKAS |
| | | QNVEDRVAWYQQKPGKAPKALIYSSSHRYKGVPSRFSGSGS |
| | | GTEFTLTISSLQPEDFATYFCQQFKSYPLTFGQGTKLEIK |
| SEQ ID NO: 81 | VL | DIQMTQSPSFLSASVGDRVTITCKASQNVEDRVAWYQQKPG |
| | | KAPKALIYSSSHRYKGVPSRFSGSGSGTEFTLTISSLQPEDFAT |
| | | YFCQQFKSYPLTFGQGTKLEIK |
| SEQ ID NO: 82 | VH | QVQLVQSGAEVKKPGSSVKVSCKASGTDFKLTYIHWVRQAP |
| | | GQGLEWMGRVSPGSGNTKYNEKFKGRVTITADTSTSTAYME |
| | | LSSLRSEDTAVYYCAGSYYSYDVLDYWGQGTTVTVSS |

A-H.4

| | | |
|---|---|---|
| SEQ ID NO: 83 | VH + VL | QVQLVQSGAEVKKPGSSVKVSCKASGTDEDKIYIHWVRQAP |
| | | GQGLEWMGRISAGSGNVKYNEKFKGRVTITADTSTSTAYME |
| | | LSSLRSEDTAVYYCAGSYYSYDVLDYWGQGTTVTVSSGGGG |
| | | SGGGGSGGGGSGGGGSDIQMTQSPSFLSASVGDRVTITCKAS |
| | | QNVEDRVAWYQQKPGKAPKALIYSSSHRYKGVPSRFSGSGS |
| | | GTEFTLTISSLQPEDFATYFCQQFKSYPLTFGQGTKLEIK |
| SEQ ID NO: 84 | VL | DIQMTQSPSFLSASVGDRVTITCKASQNVEDRVAWYQQKPG |
| | | KAPKALIYSSSHRYKGVPSRFSGSGSGTEFTLTISSLQPEDFAT |
| | | YFCQQFKSYPLTFGQGTKLEIK |
| SEQ ID NO: 85 | VH | QVQLVQSGAEVKKPGSSVKVSCKASGTDFDKIYIHWVRQAP |
| | | GQGLEWMGRISAGSGNVKYNEKFKGRVTITADTSTSTAYME |
| | | LSSLRSEDTAVYYCAGSYYSYDVLDYWGQGTTVTVSS |

A-H.5

| | | |
|---|---|---|
| SEQ ID NO: 86 | VH + VL | QVQLVQSGAEVKKPGSSVKVSCKASGHDFRDFYIHWVRQAP |
| | | GQGLEWMGRVYPGSGSYRYNEKFKGRVTITADTSTSTAYME |
| | | LSSLRSEDTAVYYCAGSYYSYDVLDYWGQGTTVTVSSGGGG |
| | | SGGGGSGGGGSGGGGSDIQMTQSPSFLSASVGDRVTITCKAS |
| | | QNVDDRVAWYQQKPGKAPKALIYSSSHRYKGVPSRFSGSGS |
| | | GTEFTLTISSLQPEDFATYFCQQFKSYPLTFGQGTKLEIK |
| SEQ ID NO: 87 | VL | DIQMTQSPSFLSASVGDRVTITCKASQNVDDRVAWYQQKPG |
| | | KAPKALIYSSSHRYKGVPSRFSGSGSGTEFTLTISSLQPEDFAT |
| | | YFCQQFKSYPLTFGQGTKLEIK |
| SEQ ID NO: 88 | VH | QVQLVQSGAEVKKPGSSVKVSCKASGHDFRDFYIHWVRQAP |
| | | GQGLEWMGRVYPGSGSYRYNEKFKGRVTITADTSTSTAYME |
| | | LSSLRSEDTAVYYCAGSYYSYDVLDYWGQGTTVTVSS |

A-H.6

| | | |
|---|---|---|
| SEQ ID NO: 89 | VH + VL | QVQLVQSGAEVKKPGSSVKVSCKASGHDFKLTYIHWVRQAP |
| | | GQGLEWMGRISAGSGNVKYNEKFKGRVTITADTSTSTAYME |
| | | LSSLRSEDTAVYYCAGSYYSYDVLDYWGQGTTVTVSSGGGG |
| | | SGGGGSGGGGSGGGGSDIQMTQSPSFLSASVGDRVTITCKAS |
| | | QNVDNRVAWYQQKPGKAPKALIYSSSHRYKGVPSRFSGSGS |
| | | GTEFTLTISSLQPEDFATYFCQQFKSYPLTFGQGTKLEIK |
| SEQ ID NO: 90 | VL | DIQMTQSPSFLSASVGDRVTITCKASQNVDNRVAWYQQKPG |
| | | KAPKALIYSSSHRYKGVPSRFSGSGSGTEFTLTISSLQPEDFAT |
| | | YFCQQFKSYPLTFGQGTKLEIK |
| SEQ ID NO: 91 | VH | QVQLVQSGAEVKKPGSSVKVSCKASGHDFKLTYIHWVRQAP |
| | | GQGLEWMGRISAGSGNVKYNEKFKGRVTITADTSTSTAYME |
| | | LSSLRSEDTAVYYCAGSYYSYDVLDYWGQGTTVTVSS |

A-H.7

| | | |
|---|---|---|
| SEQ ID NO: 92 | VH + VL | QVQLVQSGAEVKKPGSSVKVSCKASGTDFKLTYIHWVRQAP |
| | | GQGLEWMGRIFPGSGNVKYNEKFKGRVTITADTSTSTAYME |
| | | LSSLRSEDTAVYYCAGSYYSYDVLDYWGQGTTVTVSSGGGG |
| | | SGGGGSGGGGSGGGGSDIQMTQSPSFLSASVGDRVTITCKAS |
| | | QNVENKVAWHQQKPGKAPKALIYSSSHRYKGVPSRFSGSGS |
| | | GTEFTLTISSLQPEDFATYFCQQFKSYPLTFGQGTKLEIK |
| SEQ ID NO: 93 | VL | DIQMTQSPSFLSASVGDRVTITCKASQNVENKVAWHQQKPG |
| | | KAPKALIYSSSHRYKGVPSRFSGSGSGTEFTLTISSLQPEDFAT |
| | | YFCQQFKSYPLTFGQGTKLEIK |
| SEQ ID NO: 94 | VH | QVQLVQSGAEVKKPGSSVKVSCKASGTDFKLTYIHWVRQAP |
| | | GQGLEWMGRIFPGSGNVKYNEKFKGRVTITADTSTSTAYME |
| | | LSSLRSEDTAVYYCAGSYYSYDVLDYWGQGTTVTVSS |

A-H.8

| | | |
|---|---|---|
| SEQ ID NO: 95 | VH + VL | QVQLVQSGAEVKKPGSSVKVSCKASGTDFDKIYIHWVRQAP |
| | | GQGLEWMGRIFAGSGNTKYNEKFKGRVTITADTSTSTAYME |
| | | LSSLRSEDTAVYYCAGSYYSYDVLDYWGQGTTVTVSSGGGG |
| | | SGGGGSGGGGSGGGGSDIQMTQSPSFLSASVGDRVTITCKAS |
| | | QNVDDRVAWYQQKPGKAPKALIYSSSHRYKGVPSRFSGSGS |
| | | GTEFTLTISSLQPEDFATYFCQQFKSYPLTFGQGTKLEIK |
| SEQ ID NO: 96 | VL | DIQMTQSPSFLSASVGDRVTITCKASQNVDDRVAWYQQKPG |
| | | KAPKALIYSSSHRYKGVPSRFSGSGSGTEFTLTISSLQPEDFAT |
| | | YFCQQFKSYPLTFGQGTKLEIK |
| SEQ ID NO: 97 | VH | QVQLVQSGAEVKKPGSSVKVSCKASGTDFDKIYIHWVRQAP |
| | | GQGLEWMGRIFAGSGNTKYNEKFKGRVTITADTSTSTAYME |
| | | LSSLRSEDTAVYYCAGSYYSYDVLDYWGQGTTVTVSS |

A-H.9

| | | |
|---|---|---|
| SEQ ID NO: 98 | VH + VL | QVQLVQSGAEVKKPGSSVKVSCKASGHDFDKFYIHWVRQAP |
| | | GQQLEWMGRVSAGSQNVKYNEKFKGRVTITADTSTSTAYME |
| | | LSSLRSEDTAVYYCAGSYYSYDVLDYWGQGTTVTVSSGGGG |
| | | SGGGGSGQGGSGGGGSDIQMTQSPSFLSASVGDRVTITCKAS |
| | | QNVGNRVAWYQQKPGKAPKALIYSSSHRYSGVPSRFSGSGS |
| | | GTEFTLTISSLQPEDFATYFCQQFKSYPLTFGQGTKLEIK |
| SEQ ID NO: 99 | VL | DIQMTQSPSFLSASVGDRVTITCKASQNVGNRVAWYQQKPG |
| | | KAPKALIYSSSHRYSGVPSRFSGSGSGTEFTLTISSLQPEDFAT |
| | | YFCQQFKSYPLTFGQGTKLEIK |
| SEQ ID NO: | VH | QVQLVQSGAEVKKPGSSVKVSCKASGHDFDKFYIHWVRQAP |
| 100 | | GQGLEWMGRVSAGSGNVKYNEKFKGRVTITADTSTSTAYME |
| | | LSSLRSEDTAVYYCAGSYYSYDVLDYWGQGTTVTVSS |

A-H.10

| | | |
|---|---|---|
| SEQ ID NO: | VH + VL | QVQLVQSGAEVKKPGSSVKVSCKASGHDEDKFYIHWVRQAP |
| 101 | | GQGLEWMGRIFAGSGNVKYNEKFKGRVTITADTSTSTAYME |
| | | LSSLRSEDTAVYYCAGSYYSYDVLDYWGQGTTVTVSSGGGG |
| | | SGGGGSGGGGSGGGGSDIQMTQSPSFLSASVGDRVTITCKAS |
| | | QNVGDRVAWYQQKPGKAPKALIYSSSHRYKGVPSRFSGSGS |
| | | GTEFTLTISSLQPEDFATYFCQQFKSYPLTFGQGTKLEIKS |
| SEQ ID NO: | VL | DIQMTQSPSFLSASVGDRVTITCKASQNVGDRVAWYQQKPG |
| 102 | | KAPKALIYSSSHRYKGVPSRFSGSGSGTEFTLTISSLQPEDFAT |
| | | YFCQQFKSYPLTFGQGTKLEIK |
| SEQ ID NO: | VH | QVQLVQSGAEVKKPGSSVKVSCKASGHDFDKFYIHWVRQAP |
| 103 | | GQGLEWMGRIFAGSGNVKYNEKFKGRVTITADTSTSTAYME |
| | | LSSLRSEDTAVYYCAGSYYSYDVLDYWGQGTTVTVSS |

A-H.11

| | | |
|---|---|---|
| SEQ ID NO: | VH + VL | QVQLVQSGAEVKKPGSSVKVSCKASGTDFKLTYIHWVRQAP |
| 104 | | GQGLEWMGRVSPGSGNVKYNEKFKGRVTITADTSTSTAYME |
| | | LSSLRSEDTAVYYCAGSYYSYDVLDYWGQGTTVTVSSGGGG |
| | | SGGGGSGGGGSGGGGSDIQMTQSPSFLSASVGDRVTITCKAS |
| | | QNVGDRVAWYQQKPGKAPKALIYSSSHRYKGVPSRFSGSGS |
| | | GTEFTLTISSLQPEDFATYFCQQFKSYPLTFGQGTKLEIK |
| SEQ ID NO: | VL | DIQMTQSPSFLSASVGDRVTITCKASQNVGDRVAWYQQKPG |
| 105 | | KAPKALIYSSSHRYKGVPSRFSGSGSGTEFTLTISSLQPEDFAT |
| | | YFCQQFKSYPLTFGQGTKLEIK |
| SEQ ID NO: | VH | QVQLVQSGAEVKKPGSSVKVSCKASGTDFKLTYIHWVRQAP |
| 106 | | GQGLEWMGRVSPGSGNVKYNEKFKGRVTITADTSTSTAYME |
| | | LSSLRSEDTAVYYCAGSYYSYDVLDYWGQGTTVTVSS |

A-H.12

| | | |
|---|---|---|
| SEQ ID NO: | VH + VL | QVQLVQSGAEVKKPGSSVKVSCKASGTDFDKIYIHWVRQAP |
| 107 | | GQGLEWMGRVSAGSGNTKYNEKFKGRVTITADTSTSTAYME |
| | | LSSLRSEDTAVYYCAGSYYSYDVLDYWGQGTTVTVSSGGGG |
| | | SGGGGSGGGGSGGGGSDIQMTQSPSFLSASVGDRVTITCKAS |
| | | QNVGNRVAWYQQKPGKAPKALIYSSSHRYKGVPSRFSGSGS |
| | | GTEFTLTISSLQPEDFATYFCQQFKSYPLTFGQGTKLEIK |
| SEQ ID NO: | VL | DIQMTQSPSFLSASVGDRVTITCKASQNVGNRVAWYQQKPG |
| 108 | | KAPKALIYSSSHRYKGVPSRFSGSGSGTEFTLTISSLQPEDFAT |
| | | YFCQQFKSYPLTFGQGTKLEIK |
| SEQ ID NO: | VH | QVQLVQSGAEVKKPGSSVKVSCKASGTDFDKIYIHWVRQAP |
| 109 | | GQGLEWMGRVSAGSGNTKYNEKFKGRVTITADTSTSTAYME |
| | | LSSLRSEDTAVYYCAGSYYSYDVLDYWGQGTTVTVSS |

A-H.13, also referred to as A-H.69

| | | |
|---|---|---|
| SEQ ID NO: | VH + VL | QVQLVQSGAEVKKPGSSVKVSCKASGTDFKLTYIHWVRQAP |
| 110 | | GQGLEWMGRIFPGSGNVKYNEKFKGRVTITADTSTSTAYME |
| | | LSSLRSEDTAVYYCAGSYYSYDVLDYWGQGTTVTVSSGGGG |
| | | SGGGGSGGGGSGGGGSDIQMTQSPSFLSASVGDRVTITCKAS |
| | | QNVDNRVAWYQQKPGKAPKALIYSSSHRYKGVPSRFSGSGS |
| | | GTEFTLTISSLQPEDFATYFCQQFKSYPLTFGQGTKLEIK |
| SEQ ID NO: | VL | DIQMTQSPSFLSASVGDRVTITCKASQNVDNRVAWYQQKPG |
| 111 | | KAPKALIYSSSHRYKGVPSRFSGSGSGTEFTLTISSLQPEDFAT |
| | | YFCQQFKSYPLTFGQGTKLEIK |
| SEQ ID NO: | VH | QVQLVQSGAEVKKPGSSVKVSCKASGTDFKLTYIHWVRQAP |
| 112 | | GQGLEWMGRIFPGSGNVKYNEKFKGRVTITADTSTSTAYME |
| | | LSSLRSEDTAVYYCAGSYYSYDVLDYWGQGTTVTVSS |

A-H.14

| | | |
|---|---|---|
| SEQ ID NO: | VH + VL | QVQLVQSGAEVKKPGSSVKVSCKASGTDEDKIYIHWVRQAP |
| 113 | | GQGLEWMGRISAGSGNTKYNEKFKGRVTITADTSTSTAYME |
| | | LSSLRSEDTAVYYCAGSYYSYDVLDYWGQGTTVTVSSGGGG |
| | | SGGGGSGGGGSGGGGSDIQMTQSPSFLSASVGDRVTITCKAS |
| | | QNVDDRVAWYQQKPGKAPKALIYSSSHRYKGVPSRFSGSGS |
| | | GTEFTLTISSLQPEDFATYFCQQFKSYPLTFGQGTKLEIK |
| SEQ ID NO: | VL | DIQMTQSPSFLSASVGDRVTITCKASQNVDDRVAWYQQKPG |
| 114 | | KAPKALIYSSSHRYKGVPSRFSGSGSGTEFTLTISSLQPEDFAT |
| | | YFCQQFKSYPLTFGQGTKLEIK |
| SEQ ID NO: | VH | QVQLVQSGAEVKKPGSSVKVSCKASGTDFDKIYIHWVRQAP |
| 115 | | GQGLEWMGRISAGSGNTKYNEKFKGRVTITADTSTSTAYME |
| | | LSSLRSEDTAVYYCAGSYYSYDVLDYWGQGTTVTVSS |

A-H.15

| | | |
|---|---|---|
| SEQ ID NO: | VH + VL | QVQLVQSGAEVKKPGSSVKVSCKASGTDFRLTYIHWVRQAP |
| 116 | | GQGLEWMGRVSPGSGNTKYNEKFKGRVTITADTSTSTAYME |
| | | LSSLRSEDTAVYYCAGSYYSYDVLDYWGQGTTVTVSSGGGG |
| | | SGGGGSGGGGSGGGGSDIQMTQSPSFLSASVGDRVTITCKAS |
| | | QNVDNKVAWHQQKPGKAPKALIYSSSHRYKGVPSRFSGSGS |
| | | GTEFTLTISSLQPEDFATYFCQQFKSYPLTFGQGTKLEIK |
| SEQ ID NO: | VL | DIQMTQSPSFLSASVGDRVTITCKASQNVDNKVAWHQQKPQ |
| 117 | | KAPKALIYSSSHRYKGVPSRFSGSGSGTEFTLTISSLQPEDFAT |
| | | YFCQQFKSYPLTFGQGTKLEIK |
| SEQ ID NO: | VH | QVQLVQSGAEVKKPGSSVKVSCKASGTDFRLTYIHWVRQAP |
| 118 | | GQGLEWMGRVSPGSGNTKYNEKFKGRVTITADTSTSTAYME |
| | | LSSLRSEDTAVYYCAGSYYSYDVLDYWGQGTTVTVSS |

A-H.16

| | | |
|---|---|---|
| SEQ ID NO: | VH + VL | QVQLVQSGAEVKKPGSSVKVSCKASGGTFRLTYIHWVRQAP |
| 119 | | GQGLEWMGRVYPGSGNTKYNEKFKGRVTITADTSTSTAYME |
| | | LSSLRSEDTAVYYCAGSYYSYDVLDYWGQGTTVTVSSGGGG |
| | | SGGGGSGGGGSGGGGSDIQMTQSPSFLSASVGDRVTITCKAS |
| | | QNVDDRVAWYQQKPGKAPKALIYSSSHRYKGVPSRFSGSGS |
| | | GTEFTLTISSLQPEDFATYFCQQFKSYPLTFGQGTKLEIK |
| SEQ ID NO: | VL | DIQMTQSPSFLSASVGDRVTITCKASQNVDDRVAWYQQKPG |
| 120 | | KAPKALIYSSSHRYKGVPSRFSGSGSGTEFTLTISSLQPEDFAT |
| | | YFCQQFKSYPLTFGQGTKLEIK |
| SEQ ID NO: | VH | QVQLVQSGAEVKKPGSSVKVSCKASGGTFRLTYIHWVRQAP |
| 121 | | GQGLEWMGRVYPGSGNTKYNEKFKGRVTITADTSTSTAYME |
| | | LSSLRSEDTAVYYCAGSYYSYDVLDYWGQGTTVTVSS |

A-H.17

| | | |
|---|---|---|
| SEQ ID NO: | VH + VL | QVQLVQSGAEVKKPGSSVKVSCKASGTDFRLTYIHWVRQAP |
| 122 | | GQGLEWMGRIFPGSGNTKYNEKFKGRVTITADTSTSTAYMEL |
| | | SSLRSEDTAVYYCAGSYYSYDVLDYWGQGTTVTVSSGGGGS |
| | | GGGGSGGGGSGGGGSDIQMTQSPSFLSASVGDRVTITCKASQ |
| | | NVDDRVAWYQQKPGKAPKALIYSSSHRYKGVPSRFSGSGSG |
| | | TEFTLTISSLQPEDFATYFCQQFKSYPLTFGQGTKLEIK |
| SEQ ID NO: | VL | DIQMTQSPSFLSASVGDRVTITCKASQNVDDRVAWYQQKPG |
| 123 | | KAPKALIYSSSHRYKGVPSRFSGSGSGTEFTLTISSLQPEDFAT |
| | | YFCQQFKSYPLTFGQGTKLEIK |
| SEQ ID NO: | VH | QVQLVQSGAEVKKPGSSVKVSCKASGTDFRLTYIHWVRQAP |
| 124 | | GQGLEWMGRIFPGSGNTKYNEKFKGRVTITADTSTSTAYMEL |
| | | SSLRSEDTAVYYCAGSYYSYDVLDYWGQGTTVTVSS |

A-H.18

| | | |
|---|---|---|
| SEQ ID NO: | VH + VL | QVQLVQSGAEVKKPGSSVKVSCKASGTDFKLTYIHWVRQAP |
| 125 | | GQGLEWMGRIFPGSGNVKYNEKFKGRVTITADTSTSTAYME |
| | | LSSLRSEDTAVYYCAGSYYSYDVLDYWGQGTTVTVSSGGGG |
| | | SGGGGSGGGGSGGGGSDIQMTQSPSFLSASVGDRVTITCKAS |
| | | QNVEDRVAWYQQKPGKAPKALIYSSSHRYKGVPSRFSGSGS |
| | | GTEFTLTISSLQPEDFATYFCQQFKSYPLTFGQGTKLEIK |
| SEQ ID NO: | VL | DIQMTQSPSFLSASVGDRVTITCKASQNVEDRVAWYQQKPG |
| 126 | | KAPKALIYSSSHRYKGVPSRFSGSGSGTEFTLTISSLQPEDFAT |
| | | YFCQQFKSYPLTFGQGTKLEIK |
| SEQ ID NO: | VH | QVQLVQSGAEVKKPGSSVKVSCKASGTDFKLTYIHWVRQAP |
| 127 | | GQGLEWMGRIFPGSGNVKYNEKFKGRVTITADTSTSTAYME |
| | | LSSLRSEDTAVYYCAGSYYSYDVLDYWGQGTTVTVSS |

A-H.19

| | | |
|---|---|---|
| SEQ ID NO: | VH + VL | QVQLVQSGAEVKKPGSSVKVSCKASGGTFRLTYIHWVRQAP |
| 128 | | GQGLEWMGRISAGSGNVKYNEKFKGRVTITADTSTSTAYME |
| | | LSSLRSEDTAVYYCAGSYYSYDVLDYWGQGTTVTVSSGGGG |
| | | SGGGGSGGGGSGGGGSDIQMTQSPSFLSASVGDRVTITCKAS |
| | | QNVGDRVAWYQQKPGKAPKALIYSSSHRYKGVPSRFSGSGS |
| | | GTEFTLTISSLQPEDFATYFCQQFKSYPLTFGQGTKLEIK |
| SEQ ID NO: | VL | DIQMTQSPSFLSASVGDRVTITCKASQNVGDRVAWYQQKPG |
| 129 | | KAPKALIYSSSHRYKGVPSRFSGSGSGTEFTLTISSLQPEDFAT |
| | | YFCQQFKSYPLTFGQGTKLEIK |
| SEQ ID NO: | VH | QVQLVQSGAEVKKPGSSVKVSCKASGGTFRLTYIHWVRQAP |
| 130 | | GQGLEWMGRISAGSQNVKYNEKFKGRVTITADTSTSTAYME |
| | | LSSLRSEDTAVYYCAGSYYSYDVLDYWGQGTTVTVSS |

A-H.20

| | | |
|---|---|---|
| SEQ ID NO: | VH + VL | QVQLVQSGAEVKKPGSSVKVSCKASGQTFDKTYIHWVRQAP |
| 131 | | GQGLEWMGRISAGSGNTKYNEKFKGRVTITADTSTSTAYME |
| | | LSSLRSEDTAVYYCAGSYYSYDVLDYWGQGTTVTVSSGGGG |
| | | SGGGGSGGGGSGGGGSDIQMTQSPSFLSASVGDRVTITCKAS |
| | | QNVDDRVAWYQQKPGKAPKALIYSSSHRYKGVPSRFSGSGS |
| | | GTEFTLTISSLQPEDFATYFCQQFKSYPLTFGQGTKLEIK |
| SEQ ID NO: | VL | DIQMTQSPSFLSASVGDRVTITCKASQNVDDRVAWYQQKPG |
| 132 | | KAPKALIYSSSHRYKGVPSRFSGSGSGTEFTLTISSLQPEDFAT |
| | | YFCQQFKSYPLTFGQGTKLEIK |
| SEQ ID NO: | VH | QVQLVQSGAEVKKPGSSVKVSCKASGGTFDKTYIHWVRQAP |
| 133 | | GQGLEWMGRISAGSGNTKYNEKFKGRVTITADTSTSTAYME |
| | | LSSLRSEDTAVYYCAGSYYSYDVLDYWGQGTTVTVSS |

A-H.21

| | | |
|---|---|---|
| SEQ ID NO: | VH + VL | QVQLVQSGAEVKKPGSSVKVSCKASGHDFDKFYIHWVRQAP |
| 134 | | CQGLEWMGRISAGSGNTKYNEKFKGRVTITADTSTSTAYME |
| | | LSSLRSEDTAVYYCAGSYYSYDVLDYWGQGTTVTVSSGGGG |
| | | SGGGGSGGGQSGGGGSDIQMTQSPSFLSASVGDRVTITCKAS |
| | | QNVDDRVAWYQQKPGKAPKALIYSSSHRYKGVPSRFSGSGS |
| | | GTEFTLTISSLQPEDFATYFCQQFKSYPLTFGQGTKLEIK |
| SEQ ID NO: | VL | DIQMTQSPSFLSASVGDRVTITCKASQNVDDRVAWYQQKPG |
| 135 | | KAPKALIYSSSHRYKGVPSRFSGSGSGTEFTLTISSLQPEDFAT |
| | | YFCQQFKSYPLTFGQGTKLEIK |
| SEQ ID NO: | VH | QVQLVQSGAEVKKPGSSVKVSCKASGHDFDKFYIHWVRQAP |
| 136 | | GQGLEWMGRISAGSQNTKYNEKFKGRVTITADTSTSTAYME |
| | | LSSLRSEDTAVYYCAGSYYSYDVLDYWGQGTTVTVSS |

A-H.22

| | | |
|---|---|---|
| SEQ ID NO: | VH + VL | QVQLVQSGAEVKKPGSSVKVSCKASGTDFKLTYIHWVRQAP |
| 137 | | GQGLEWMGRISAGSGNVKYNEKFKGRVTITADTSTSTAYME |
| | | LSSLRSEDTAVYYCAGSYYSYDVLDYWGQGTTVTVSSGGGG |
| | | SGGGGSGGGGSGGGGSDIQMTQSPSFLSASVGDRVTITCKAS |
| | | QNVDNKVAWHQQKPGKAPKALIYSSSHRYKGVPSRFSGSGS |
| | | GTEFTLTISSLQPEDFATYFCQQFKSYPLTFGQGTKLEIK |
| SEQ ID NO: | VL | DIQMTQSPSFLSASVGDRVTITCKASQNVDNKVAWHQQKPG |
| 138 | | KAPKALIYSSSHRYKGVPSRFSGSGSGTEFTLTISSLQPEDFAT |
| | | YFCQQFKSYPLTFGQGTKLEIK |
| SEQ ID NO: | VH | QVQLVQSGAEVKKPGSSVKVSCKASGTDFKLTYIHWVRQAP |
| 139 | | GQGLEWMGRISAGSGNVKYNEKFKGRVTITADTSTSTAYME |
| | | LSSLRSEDTAVYYCAGSYYSYDVLDYWGQGTTVTVSS |

A-H.23

| | | |
|---|---|---|
| SEQ ID NO: | VH + VL | QVQLVQSGAEVKKPGSSVKVSCKASGHDFRLTYIHWVRQAP |
| 140 | | GQGLEWMGRISAGSGNVKYNEKFKGRVTITADTSTSTAYME |
| | | LSSLRSEDTAVYYCAGSYYSYDVLDYWGQGTTVTVSSGGGG |
| | | SGGGGSGGGGSGGGGSDIQMTQSPSFLSASVGDRVTITCKAS |
| | | QNVADRVAWYQQKPGKAPKALIYSSSHRYKGVPSRFSGSGS |
| | | GTEFTLTISSLQPEDFATYFCQQFKSYPLTFGQGTKLEIK |
| SEQ ID NO: | VL | DIQMTQSPSFLSASVGDRVTITCKASQNVADRVAWYQQKPG |
| 141 | | KAPKALIYSSSHRYKGVPSRFSGSGSGTEFTLTISSLQPEDFAT |
| | | YFCQQFKSYPLTFGQGTKLEIK |
| SEQ ID NO: | VH | QVQLVQSGAEVKKPGSSVKVSCKASGHDFRLTYIHWVRQAP |
| 142 | | GQGLEWMGRISAGSGNVKYNEKFKGRVTITADTSTSTAYME |
| | | LSSLRSEDTAVYYCAGSYYSYDVLDYWGQGTTVTVSS |

A-H.24

| | | |
|---|---|---|
| SEQ ID NO: | VH + VL | QVQLVQSGAEVKKPGSSVKVSCKASGHDFHLWYIHWVRQA |
| 143 | | PGQGLEWMGRVSAGSGNVKYNEKFKGRVTITADTSTSTAYM |
| | | ELSSLRSEDTAVYYCAGSYYSYDVLDYWGQGTTVTVSSGGG |
| | | GSGGGGSGGGGSGGGGSDIQMTQSPSFLSASVGDRVTITCKA |
| | | SQNVDNKVAWHQQKPGKAPKALIYSSSHRYKGVPSRFSGSG |
| | | SGTEFTLTISSLQPEDFATYFCQQFKSYPLTFGQGTKLEIK |
| SEQ ID NO: | VL | DIQMTQSPSFLSASVGDRVTITCKASQNVDNKVAWHQQKPG |
| 144 | | KAPKALIYSSSHRYKGVPSRFSGSGSGTEFTLTISSLQPEDFAT |
| | | YFCQQFKSYPLTFGQGTKLEIK |
| SEQ ID NO: | VH | QVQLVQSGAEVKKPGSSVKVSCKASGHDFHLWYIHWVRQA |
| 145 | | PGQGLEWMGRVSAGSGNVKYNEKFKGRVTITADTSTSTAYM |
| | | ELSSLRSEDTAVYYCAGSYYSYDVLDYWGQGTTVTVSS |

A-H.25

| | | |
|---|---|---|
| SEQ ID NO: | VH + VL | QVQLVQSGAEVKKPGSSVKVSCKASGHDFHLWYIHWVRQA |
| 146 | | PGQGLEWMGRVFAGSGNTKYNEKFKGRVTITADTSTSTAYM |
| | | ELSSLRSEDTAVYYCAGSYYSYDVLDYWGQGTTVTVSSGGG |
| | | GSGGGGSGGGGSGGGGSDIQMTQSPSFLSASVGDRVTITCKA |
| | | SQNVEDKVAWYQQKPGKAPKALIYSSSHRYKQVPSRFSGSG |
| | | SGTEFTLTISSLQPEDFATYFCQQFKSYPLTFGQGTKLEIK |
| SEQ ID NO: | VL | DIQMTQSPSFLSASVGDRVTITCKASQNVEDKVAWYQQKPG |
| 147 | | KAPKALIYSSSHRYKGVPSRFSGSGSGTEFTLTISSLQPEDFAT |
| | | YFCQQFKSYPLTFGQGTKLEIK |
| SEQ ID NO: | VH | QVQLVQSGAEVKKPGSSVKVSCKASGHDFHLWYIHWVRQA |
| 148 | | PGQGLEWMGRVFAGSGNTKYNEKFKGRVTITADTSTSTAYM |
| | | ELSSLRSEDTAVYYCAGSYYSYDVLDYWGQGTTVTVSS |

A-H.26

| | | |
|---|---|---|
| SEQ ID NO: | VH + VL | QVQLVQSGAEVKKPGSSVKVSCKASGTDFKLTYIHWVRQAP |
| 149 | | GQGLEWMGRIFPGSGNTKYNEKFKGRVTITADTSTSTAYMEL |
| | | SSLRSEDTAVYYCAGSYYSYDVLDYWGQGTTVTVSSGGGGS |
| | | GGGGSGGGGSGGGGSDIQMTQSPSFLSASVGDRVTITCKASQ |
| | | NVDDRVAWYQQKPGKAPKALIYSSSHRYKGVPSRFSGSGSG |
| | | TEFTLTISSLQPEDFATYFCQQFKSYPLTFGQGTKLEIK |
| SEQ ID NO: | VL | DIQMTQSPSFLSASVGDRVTITCKASQNVDDRVAWYQQKPG |
| 150 | | KAPKALIYSSSHRYKGVPSRFSGSGSGTEFTLTISSLQPEDFAT |
| | | YFCQQFKSYPLTFGQGTKLEIK |
| SEQ ID NO: | VH | QVQLVQSGAEVKKPGSSVKVSCKASGTDFKLTYIHWVRQAP |
| 151 | | GQGLEWMGRIFPGSGNTKYNEKFKGRVTITADTSTSTAYMEL |
| | | SSLRSEDTAVYYCAGSYYSYDVLDYWGQGTTVTVSS |

A-H.27

| | | |
|---|---|---|
| SEQ ID NO: | VH + VL | QVQLVQSGAEVKKPGSSVKVSCKASGTDFKLTYIHWVRQAP |
| 153 | | GQGLEWMGRVSAGSGNVKYNEKFKGRVTITADTSTSTAYME |
| | | LSSLRSEDTAVYYCAGSYYSYDVLDYWGQGTTVTVSSGGGG |
| | | SGGGGSGGGGSGGGGSDIQMTQSPSFLSASVGDRVTITCKAS |
| | | QNVGNRVAWYQQKPGKAPKALIYSSSHRYKGVPSRFSGSGS |
| | | GTEFTLTISSLQPEDFATYFCQQFKSYPLTFGQGTKLEIK |
| SEQ ID NO: | VL | DIQMTQSPSFLSASVGDRVTITCKASQNVGNRVAWYQQKPG |
| 154 | | KAPKALIYSSSHRYKGVPSRFSGSGSGTEFTLTISSLQPEDFAT |
| | | YFCQQFKSYPLTFGQGTKLEIK |
| SEQ ID NO: | VH | QVQLVQSGAEVKKPGSSVKVSCKASGTDFKLTYIHWVRQAP |
| 155 | | GQGLEWMGRVSAGSGNVKYNEKFKGRVTITADTSTSTAYME |
| | | LSSLRSEDTAVYYCAGSYYSYDVLDYWGQGTTVTVSS |

A-H.28

| | | |
|---|---|---|
| SEQ ID NO: | VH + VL | QVQLVQSGAEVKKPGSSVKVSCKASGTDFKLTYIHWVRQAP |
| 156 | | GQGLEWMGRISPGSGNTKYNEKFKGRVTITADTSTSTAYMEL |
| | | SSLRSEDTAVYYCAGSYYSYDVLDYWGQGTTVTVSSGGGGS |
| | | GGGGSGGGGSGGGGSDIQMTQSPSFLSASVGDRVTITCKASQ |
| | | NVGDRVAWYQQKPGKAPKALIYSSSHRYKGVPSRFSGSGSG |
| | | TEFTLTISSLQPEDFATYFCQQFKSYPLTFGQGTKLEIK |
| SEQ ID NO: | VL | DIQMTQSPSFLSASVGDRVTITCKASQNVGDRVAWYQQKPG |
| 157 | | KAPKALIYSSSHRYKGVPSRFSGSGSGTEFTLTISSLQPEDFAT |
| | | YFCQQFKSYPLTFGQGTKLEIK |
| SEQ ID NO: | VH | QVQLVQSGAEVKKPGSSVKVSCKASGTDFKLTYIHWVRQAP |
| 158 | | GQGLEWMGRISPGSGNTKYNEKFKGRVTITADTSTSTAYMEL |
| | | SSLRSEDTAVYYCAGSYYSYDVLDYWGQGTTVTVSS |

A-H.29

| | | |
|---|---|---|
| SEQ ID NO: | VH + VL | QVQLVQSGAEVKKPGSSVKVSCKASGHDFHLWYIHWVRQA |
| 159 | | PGQGLEWMGRISPGSGNVKYNEKFKGRVTITADTSTSTAYME |
| | | LSSLRSEDTAVYYCAGSYYSYDVLDYWGQGTTVTVSSGGGG |
| | | SGGGGSGGGGSGGGGSDIQMTQSPSFLSASVGDRVTITCKAS |
| | | QNVGDRVAWHQQKPGKAPKALIYSSSHRYKGVPSRFSGSGS |
| | | GTEFTLTISSLQPEDFATYFCQQFKSYPLTFGQGTKLEIK |
| SEQ ID NO: | VL | DIQMTQSPSFLSASVGDRVTITCKASQNVGDRVAWHQQKPG |
| 160 | | KAPKALIYSSSHRYKGVPSRFSGSGSQTEFTLTISSLQPEDFAT |
| | | YFCQQFKSYPLTFGQGTKLEIK |
| SEQ ID NO: | VH | QVQLVQSGAEVKKPGSSVKVSCKASGHDFHLWYIHWVRQA |
| 161 | | PGQGLEWMGRISPGSGNVKYNEKFKGRVTITADTSTSTAYME |
| | | LSSLRSEDTAVYYCAGSYYSYDVLDYWGQGTTVTVSS |

A-H.31

| | | |
|---|---|---|
| SEQ ID NO: | VH + VL | QVQLVQSGAEVKKPGSSVKVSCKASGHDFKLTYIHWVRQAP |
| 162 | | GQGLEWMGRISAGSGNVKYNEKFKGRVTITADTSTSTAYME |
| | | LSSLRSEDTAVYYCAGSYYSYDVLDYWGQGTTVTVSSGGGG |
| | | SGGGGSGGGGSGGGGSDIQMTQSPSFLSASVGDRVTITCKAS |
| | | QNVDDRVAWYQQKPGKAPKALIYSSSHRYKGVPSRFSGSGS |
| | | GTEFTLTISSLQPEDFATYFCQQFKSYPLTFGQGTKLEIK |
| SEQ ID NO: | VL | DIQMTQSPSFLSASVGDRVTITCKASQNVDDRVAWYQQKPG |
| 163 | | KAPKALIYSSSHRYKGVPSRFSGSGSGTEFTLTISSLQPEDFAT |
| | | YFCQQFKSYPLTFGQGTKLEIK |
| SEQ ID NO: | VH | QVQLVQSGAEVKKPGSSVKVSCKASGHDFKLTYIHWVRQAP |
| 164 | | GQGLEWMGRISAGSGNVKYNEKFKGRVTITADTSTSTAYME |
| | | LSSLRSEDTAVYYCAGSYYSYDVLDYWGQGTTVTVSS |

A-H.31

| | | |
|---|---|---|
| SEQ ID NO: | VH + VL | QVQLVQSGAEVKKPGSSVKVSCKASGTDFHLWYIHWVRQAP |
| 165 | | GQGLEWMGRVFAGSGSYRYNEKFKGRVTITADTSTSTAYME |
| | | LSSLRSEDTAVYYCAGSYYSYDVLDYWGQGTTVTVSSGGGG |
| | | SGGGGSGGGGSGGGGSDIQMTQSPSFLSASVGDRVTITCKAS |
| | | QNVDDRVAWYQQKPGKAPKALIYSSSHRYKGVPSRFSGSGS |
| | | GTEFTLTISSLQPEDFATYFCQQFKSYPLTFGQGTKLEIK |
| SEQ ID NO: | VL | DIQMTQSPSFLSASVGDRVTITCKASQNVDDRVAWYQQKPG |
| 166 | | KAPKALIYSSSHRYKGVPSRFSGSGSGTEFTLTISSLQPEDFAT |
| | | YFCQQFKSYPLTFGQGTKLEIK |
| SEQ ID NO: | VH | QVQLVQSGAEVKKPGSSVKVSCKASGTDFHLWYIHWVRQAP |
| 167 | | GQGLEWMGRVFAGSGSYRYNEKFKGRVTITADTSTSTAYME |
| | | LSSLRSEDTAVYYCAGSYYSYDVLDYWGQGTTVTVSS |

A-H.32

| | | |
|---|---|---|
| SEQ ID NO: | VH + VL | QVQLVQSGAEVKKPGSSVKVSCKASGTDFDKIYIHWVRQAP |
| 168 | | GQQGLEWMGRISAGSQNTKYNEKFKGRVTITADTSTSTAYME |
| | | LSSLRSEDTAVYYCAGSYYSYDVLDYWGQGTTVTVSSGGGG |
| | | SGGGGSGGGGSGGGGSDIQMTQSPSFLSASVGDRVTITCKAS |
| | | QNVADRVAWYQQKPGKAPKALIYSSSHRYKGVPSRFSGSGS |
| | | GTEFTLTISSLQPEDFATYFCQQFKSYPLTFGQGTKLEIK |
| SEQ ID NO: | VL | DIQMTQSPSFLSASVGDRVTITCKASQNVADRVAWYQQKPG |
| 169 | | KAPKALIYSSSHRYKGVPSRFSGSGSGTEFTLTISSLQPEDFAT |
| | | YFCQQFKSYPLTFGQGTKLEIK |
| SEQ ID NO: | VH | QVQLVQSGAEVKKPGSSVKVSCKASGTDFDKIYIHWVRQAP |
| 170 | | GQGLEWMGRISAGSGNTKYNEKFKGRVTITADTSTSTAYME |
| | | LSSLRSEDTAVYYCAGSYYSYDVLDYWGQGTTVTVSS |

A-H.33

| | | |
|---|---|---|
| SEQ ID NO: | VH + VL | QVQLVQSGAEVKKPGSSVKVSCKASGTDFKLTYIHWVRQAP |
| 171 | | GQGLEWMGRISAGSGNTKYNEKFKGRVTITADTSTSTAYME |
| | | LSSLRSEDTAVYYCAGSYYSYDVLDYWGQGTTVTVSSGGGG |
| | | SGGGGSGGGGSGGGGSDIQMTQSPSFLSASVGDRVTITCKAS |
| | | QNVEDRVAWYQQKPGKAPKALIYSSSHRYKGVPSRFSGSGS |
| | | GTEFTLTISSLQPEDFATYFCQQFKSYPLTFGQGTKLEIK |
| SEQ ID NO: | VL | DIQMTQSPSFLSASVGDRVTITCKASQNVEDRVAWYQQKPG |
| 172 | | KAPKALIYSSSHRYKGVPSRFSGSGSQTEFTLTISSLQPEDFAT |
| | | YFCQQFKSYPLTFGQGTKLEIK |
| SEQ ID NO: | VH | QVQLVQSGAEVKKPGSSVKVSCKASGTDFKLTYIHWVRQAP |
| 173 | | GQGLEWMGRISAGSGNTKYNEKFKGRVTITADTSTSTAYME |
| | | LSSLRSEDTAVYYCAGSYYSYDVLDYWGQGTTVTVSS |

A-H.34

| | | |
|---|---|---|
| SEQ ID NO: | VH + VL | QVQLVQSGAEVKKPGSSVKVSCKASGTDFRLTYIHWVRQAP |
| 174 | | GQGLEWMGRISPGSGNTKYNEKFKGRVTITADTSTSTAYMEL |
| | | SSLRSEDTAVYYCAGSYYSYDVLDYWGQGTTVTVSSGGGGS |
| | | GGGGSGGGGSGGGGSDIQMTQSPSFLSASVGDRVTITCKASQ |
| | | NVGNRVAWYQQKPGKAPKALIYSSSHRYKGVPSRFSGSGSG |
| | | TEFTLTISSLQPEDFATYFCQQFKSYPLTFGQGTKLEIK |
| SEQ ID NO: | VL | DIQMTQSPSFLSASVGDRVTITCKASQNVGNRVAWYQQKPG |
| 175 | | KAPKALIYSSSHRYKGVPSRFSGSGSGTEFTLTISSLQPEDFAT |
| | | YFCQQFKSYPLTFGQGTKLEIK |
| SEQ ID NO: | VH | QVQLVQSGAEVKKPGSSVKVSCKASGTDFRLTYIHWVRQAP |
| 176 | | GQGLEWMGRISPGSGNTKYNEKFKGRVTITADTSTSTAYMEL |
| | | SSLRSEDTAVYYCAGSYYSYDVLDYWGQGTTVTVSS |

A-H.35

| | | |
|---|---|---|
| SEQ ID NO: | VH + VL | QVQLVQSGAEVKKPGSSVKVSCKASGHDEDKTYIHWVRQAP |
| 177 | | GQGLEWMGRVSAGSGNVKYNEKFKGRVTITADTSTSTAYME |
| | | LSSLRSEDTAVYYCAGSYYSYDVLDYWGQGTTVTVSSGGGG |
| | | SGGGGSGGGGSGGGGSDIQMTQSPSFLSASVGDRVTITCKAS |
| | | QNVEDRVAWYQQKPGKAPKALIYSSSHRYKGVPSRFSGSGS |
| | | GTEFTLTISSLQPEDFATYFCQQFKSYPLTFGQGTKLEIK |
| SEQ ID NO: | VL | DIQMTQSPSFLSASVGDRVTITCKASQNVEDRVAWYQQKPG |
| 178 | | KAPKALIYSSSHRYKGVPSRFSGSGSGTEFTLTISSLQPEDFAT |
| | | YFCQQFKSYPLTFGQGTKLEIK |
| SEQ ID NO: | VH | QVQLVQSGAEVKKPGSSVKVSCKASGHDFDKTYIHWVRQAP |
| 179 | | GQGLEWMGRVSAGSGNVKYNEKFKGRVTITADTSTSTAYME |
| | | LSSLRSEDTAVYYCAGSYYSYDVLDYWGQGTTVTVSS |

A-H.36

| | | |
|---|---|---|
| SEQ ID NO: | VH + VL | QVQLVQSGAEVKKPGSSVKVSCKASGHDFKLTYIHWVRQAP |
| 180 | | GQGLEWMGRVSPGSGNTKYNEKFKGRVTITADTSTSTAYME |
| | | LSSLRSEDTAVYYCAGSYYSYDVLDYWGQGTTVTVSSGGGG |
| | | SGGGGSGGGGSGGGGSDIQMTQSPSFLSASVGDRVTITCKAS |
| | | QNVEDRVAWHQQKPGKAPKALIYSSSHRYKGVPSRFSQSGS |
| | | GTEFTLTISSLQPEDFATYFCQQFKSYPLTFGQGTKLEIK |
| SEQ ID NO: | VL | DIQMTQSPSFLSASVGDRVTITCKASQNVEDRVAWHQQKPG |
| 181 | | KAPKALIYSSSHRYKGVPSRFSGSGSGTEFTLTISSLQPEDFAT |
| | | YFCQQFKSYPLTFGQGTKLEIK |
| SEQ ID NO: | VH | QVQLVQSGAEVKKPGSSVKVSCKASGHDFKLTYIHWVRQAP |
| 182 | | GQGLEWMGRVSPGSGNTKYNEKFKGRVTITADTSTSTAYME |
| | | LSSLRSEDTAVYYCAGSYYSYDVLDYWGQGTTVTVSS |

A-H.37

| | | |
|---|---|---|
| SEQ ID NO: | VH + VL | QVQLVQSGAEVKKPGSSVKVSCKASGHDEDKTYIHWVRQAP |
| 183 | | GQGLEWMGRIYPGSGNVKYNEKFKGRVTITADTSTSTAYME |
| | | LSSLRSEDTAVYYCAGSYYSYDVLDYWGQGTTVTVSSGGGG |
| | | SGGGGSGGGGSGGGGSDIQMTQSPSFLSASVGDRVTITCKAS |
| | | QNVADRVAWYQQKPGKAPKALIYSSSHRYKGVPSRFSGSGS |
| | | GTEFTLTISSLQPEDFATYFCQQFKSYPLTFGQGTKLEIK |
| SEQ ID NO: | VI | DIQMTQSPSFLSASVGDRVTITCKASQNVADRVAWYQQKPG |
| 184 | | KAPKALIYSSSHRYKGVPSRFSGSGSGTEFTLTISSLQPEDFAT |
| | | YFCQQFKSYPLTFGQGTKLEIK |
| SEQ ID NO: | VH | QVQLVQSGAEVKKPGSSVKVSCKASGHDEDKTYIHWVRQAP |
| 185 | | GQGLEWMGRIYPGSGNVKYNEKFKGRVTITADTSTSTAYME |
| | | LSSLRSEDTAVYYCAGSYYSYDVLDYWGQGTTVTVSS |

A-H.38

| | | |
|---|---|---|
| SEQ ID NO: | VH + VL | QVQLVQSGAEVKKPGSSVKVSCKASGTDFDKTYIHWVRQAP |
| 186 | | GQGLEWMGRISAGSGNVKYNEKFKGRVTITADTSTSTAYME |
| | | LSSLRSEDTAVYYCAGSYYSYDVLDYWGQGTTVTVSSGGGG |
| | | SGGGGSGGGGSGGGGSDIQMTQSPSFLSASVGDRVTITCKAS |
| | | QNVDDRVAWYQQKPGKAPKALIYSSSHRYKGVPSRFSGSGS |
| | | GTEFTLTISSLQPEDFATYFCQQFKSYPLTFGQGTKLEIK |
| SEQ ID NO: | VL | DIQMTQSPSFLSASVGDRVTITCKASQNVDDRVAWYQQKPG |
| 187 | | KAPKALIYSSSHRYKGVPSRFSGSGSGTEFTLTISSLQPEDFAT |
| | | YFCQQFKSYPLTFGQGTKLEIK |
| SEQ ID NO: | VH | QVQLVQSGAEVKKPGSSVKVSCKASGTDFDKTYIHWVRQAP |
| 188 | | GQGLEWMGRISAGSGNVKYNEKFKGRVTITADTSTSTAYME |
| | | LSSLRSEDTAVYYCAGSYYSYDVLDYWGQGTTVTVSS |

A-H.39

| | | |
|---|---|---|
| SEQ ID NO: | VH + VL | QVQLVQSGAEVKKPGSSVKVSCKASGTDFDKIYIHWVRQAP |
| 189 | | GQGLEWMGRISAGSGNIKYNEKFKGRVTITADTSTSTAYMEL |
| | | SSLRSEDTAVYYCAGSYYSYDVLDYWGQGTTVTVSSGGGGS |
| | | GGGGSGGGGGGGGSDIQMTQSPSFLSASVGDRVTITCKASQ |
| | | NVDDRVAWYQQKPGKAPKALIYSSSHRYKGVPSRFSGSGSG |
| | | TEFTLTISSLQPEDFATYFCQQFKSYPLTFGQGTKLEIK |
| SEQ ID NO: | VL | DIQMTQSPSFLSASVGDRVTITCKASQNVDDRVAWYQQKPG |
| 190 | | KAPKALIYSSSHRYKGVPSRFSGSGSGTEFTLTISSLQPEDFAT |
| | | YFCQQFKSYPLTFGQGTKLEIK |
| SEQ ID NO: | VH | QVQLVQSGAEVKKPGSSVKVSCKASGTDFDKIYIHWVRQAP |
| 191 | | GQGLEWMGRISAGSGNIKYNEKFKGRVTITADTSTSTAYMEL |
| | | SSLRSEDTAVYYCAGSYYSYDVLDYWGQGTTVTVSS |

A-H.40

| | | |
|---|---|---|
| SEQ ID NO: | VH + VL | QVQLVQSGAEVKKPGSSVKVSCKASGTDFDKIYIHWVRQAP |
| 192 | | GQGLEWMGRISAGSGNVKYNEKFKGRVTITADTSTSTAYME |
| | | LSSLRSEDTAVYYCAGSYYSYDVLDYWGQGTTVTVSSGGGG |
| | | SGGGGSGGGGSGGGGSDIQMTQSPSFLSASVGDRVTITCKAS |
| | | QNVGDRVAWYQQKPGKAPKALIYSSSHRYKGVPSRFSGSGS |
| | | GTEFTLTISSLQPEDFATYFCQQFKSYPLTFGQGTKLEIK |
| SEQ ID NO: | VL | DIQMTQSPSFLSASVGDRVTITCKASQNVGDRVAWYQQKPG |
| 193 | | KAPKALIYSSSHRYKGVPSRFSGSGSGTEFTLTISSLQPEDFAT |
| | | YFCQQFKSYPLTFGQGTKLEIK |
| SEQ ID NO: | VH | QVQLVQSGAEVKKPGSSVKVSCKASGTDFDKIYIHWVRQAP |
| 194 | | GQGLEWMGRISAGSGNVKYNEKFKGRVTITADTSTSTAYME |
| | | LSSLRSEDTAVYYCAGSYYSYDVLDYWGQGTTVTVSS |

A-H.41

| | | |
|---|---|---|
| SEQ ID NO: | VH + VL | QVQLVQSGAEVKKPGSSVKVSCKASGGTFKLTYIHWVRQAP |
| 195 | | GQGLEWMGRVSAGSGNVKYNEKFKGRVTITADTSTSTAYME |
| | | LSSLRSEDTAVYYCAGSYYSYDVLDYWGQGTTVTVSSGGGG |
| | | SGGGGSGGGGSGGGGSDIQMTQSPSFLSASVGDRVTITCKAS |
| | | QNVDDRVAWYQQKPGKAPKALIYSSSHRYKGVPSRFSGSGS |
| | | GTEFTLTISSLQPEDFATYFCQQFKSYPLTFGQGTKLEIK |
| SEQ ID NO: | VL | DIQMTQSPSFLSASVGDRVTITCKASQNVDDRVAWYQQKPG |
| 196 | | KAPKALIYSSSHRYKGVPSRFSGSGSGTEFTLTISSLQPEDFAT |
| | | YFCQQFKSYPLTFGQGTKLEIK |
| SEQ ID NO: | VH | QVQLVQSGAEVKKPGSSVKVSCKASGGTFKLTYIHWVRQAP |
| 197 | | GQGLEWMGRVSAGSQNVKYNEKFKGRVTITADTSTSTAYME |
| | | LSSLRSEDTAVYYCAGSYYSYDVLDYWGQGTTVTVSS |

A-H.42

| | | |
|---|---|---|
| SEQ ID NO: | VH + VL | QVQLVQSGAEVKKPGSSVKVSCKASGTDFKLTYIHWVRQAP |
| 198 | | GQGLEWMGRISPGSGNVKYNEKFKGRVTITADTSTSTAYME |
| | | LSSLRSEDTAVYYCAGSYYSYDVLDYWGQGTTVTVSSGGGG |
| | | SGGGGSGGGGSGGGGSDIQMTQSPSFLSASVGDRVTITCKAS |
| | | QNVDNRVAWHQQKPGKAPKALIYSSSHRYKGVPSRFSGSGS |
| | | GTEFTLTISSLQPEDFATYFCQQFKSYPLTFGQGTKLEIK |
| SEQ ID NO: | VL | DIQMTQSPSFLSASVGDRVTITCKASQNVDNRVAWHQQKPG |
| 199 | | KAPKALIYSSSHRYKGVPSRFSGSGSGTEFTLTISSLQPEDFAT |
| | | YFCQQFKSYPLTFGQGTKLEIK |
| SEQ ID NO: | VH | QVQLVQSGAEVKKPGSSVKVSCKASGTDFKLTYIHWVRQAP |
| 200 | | GQGLEWMGRISPGSGNVKYNEKFKGRVTITADTSTSTAYME |
| | | LSSLRSEDTAVYYCAGSYYSYDVLDYWGQGTTVTVSS |

A-H.43

| | | |
|---|---|---|
| SEQ ID NO: | VH + VL | QVQLVQSGAEVKKPGSSVKVSCKASGHDFDKFYIHWVRQAP |
| 201 | | GQGLEWMGRVSAGSGNTKYNEKFKGRVTITADTSTSTAYME |
| | | LSSLRSEDTAVYYCAGSYYSYDVLDYWGQGTTVTVSSGGGG |
| | | SGGGGSGGGGSGGGGSDIQMTQSPSFLSASVGDRVTITCKAS |
| | | QNVDNRVAWYQQKPGKAPKALIYSSSHRYKGVPSRFSGSGS |
| | | GTEFTLTISSLQPEDFATYFCQQFKSYPLTFGQGTKLEIK |
| SEQ ID NO: | VL | DIQMTQSPSFLSASVGDRVTITCKASQNVDNRVAWYQQKPG |
| 202 | | KAPKALIYSSSHRYKGVPSRFSGSGSGTEFTLTISSLQPEDFAT |
| | | YFCQQFKSYPLTFGQGTKLEIK |
| SEQ ID NO: | VH | QVQLVQSGAEVKKPGSSVKVSCKASGHDFDKFYIHWVRQAP |
| 203 | | GQGLEWMGRVSAGSGNTKYNEKFKGRVTITADTSTSTAYME |
| | | LSSLRSEDTAVYYCAGSYYSYDVLDYWGQGTTVTVSS |

A-H.44

| | | |
|---|---|---|
| SEQ ID NO: | VH + VL | QVQLVQSGAEVKKPGSSVKVSCKASGTDEDKFYIHWVRQAP |
| 204 | | GQGLEWMGRVSAGSGNVKYNEKFKGRVTITADTSTSTAYME |
| | | LSSLRSEDTAVYYCAGSYYSYDVLDYWGQGTTVTVSSGGGG |
| | | SGGGGSGGGGSGGGGSDIQMTQSPSFLSASVGDRVTITCKAS |
| | | QNVGDRVVWYQQKPGKAPKALIYSSSHRYKGVPSRFSGSGS |
| | | GTEFTLTISSLQPEDFATYFCQQFKSYPLTFGQGTKLEIK |
| SEQ ID NO: | VH | QVQLVQSGAEVKKPGSSVKVSCKASGTDEDKFYIHWVRQAP |
| 205 | | GQGLEWMGRVSAGSGNVKYNEKFKGRVTITADTSTSTAYME |
| | | LSSLRSEDTAVYYCAGSYYSYDVLDYWGQGTTVTVSS |

A-H.45

| | | |
|---|---|---|
| SEQ ID NO: | VH + VL | QVQLVQSGAEVKKPGSSVKVSCKASGYSFTTYYIHWVRQAP |
| 206 | | GQGLEWMGWFSAGSGNTKYNEKFKGRVTITADTSTSTAYME |
| | | LSSLRSEDTAVYYCAVSYYSYDVLDYWGQGTTVTVSSGGGG |
| | | SGGGGSGGGGSGGGGSDIQMTQSPSFLSASVGDRVTITCKAS |
| | | QNVGINVVWHQQKPGKAPKALIYSSSHRYSGVPSRFSGSGSG |
| | | TEFTLTISSLQPEDFATYFCQQFKSYPLTFGQGTKLEIK |
| SEQ ID NO: | VH | QVQLVQSGAEVKKPGSSVKVSCKASGYSFTTYYIHWVRQAP |
| 207 | | GQGLEWMGWFSAGSGNTKYNEKFKGRVTITADTSTSTAYME |
| | | LSSLRSEDTAVYYCAVSYYSYDVLDYWGQGTTVTVSS |

A-H.46

| | | |
|---|---|---|
| SEQ ID NO: | VH + VL | QVQLVQSGAEVKKPGSSVKVSCKASGYSFTTYYIHWVRQAP |
| 208 | | GQGLEWMGWFSAGSGNTKYNEKFKGRVTITADTSTSTAYME |
| | | LSSLRSEDTAVYYCAGSYYSYDVLDYWGQGTTVTVSSGGGG |
| | | SGGGGSGGGGSGGGGSDIQMTQSPSFLSASVGDRVTITCKAS |
| | | QNVGINVVWHQQKPGKAPKALIYSSSHRYSGVPSRFSGSGSG |
| | | TEFTLTISSLQPEDFATYFCQQFKSYPLTFGQGTKLEIK |
| SEQ ID NO: | VH | QVQLVQSGAEVKKPGSSVKVSCKASGYSFTTYYIHWVRQAP |
| 209 | | GQGLEWMGWFSAGSGNTKYNEKFKGRVTITADTSTSTAYME |
| | | LSSLRSEDTAVYYCAGSYYSYDVLDYWGQGTTVTVSS |

A-H.47

| | | |
|---|---|---|
| SEQ ID NO: | VH + VL | QVQLVQSGAEVKKPGSSVKVSCKASGYSFTTYYIHWVRQAP |
| 210 | | GQGLEWMGWFFPGSGNTKYNEKFKGRVTITADTSTSTAYME |
| | | LSSLRSEDTAVYYCAGSYYSYDVLDYWGQGTTVTVSSGGGG |
| | | SGGGGSGGGGSGGGGSDIQMTQSPSFLSASVGDRVTITCKAS |
| | | QNVGINVVWHQQKPGKAPKALIYSSSHRYSGVPSRFSGSGSG |
| | | TEFTLTISSLQPEDFATYFCQQFKSYPLTFGQGTKLEIK |
| SEQ ID NO: | VH | QVQLVQSGAEVKKPGSSVKVSCKASGYSFTTYYIHWVRQAP |
| 211 | | GQGLEWMGWFFPGSGNTKYNEKFKGRVTITADTSTSTAYME |
| | | LSSLRSEDTAVYYCAGSYYSYDVLDYWGQGTTVTVSS |

A-H.48

| | | |
|---|---|---|
| SEQ ID NO: | VH + VL | QVQLVQSGAEVKKPGSSVKVSCKASGYSFTTYYIHWVRQAP |
| 212 | | GQGLEWMGWFSPGSGNTKYNEKFKGRVTITADTSTSTAYME |
| | | LSSLRSEDTAVYYCAVSYYSYDVLDYWGQGTTVTVSSGGGG |
| | | SGGGGSGGGGSGGGGSDIQMTQSPSFLSASVGDRVTITCKAS |
| | | QNVGINVVWHQQKPGKAPKALIYSSSHRYSGVPSRFSGSGSG |
| | | TEFTLTISSLQPEDFATYFCQQFKSYPLTFGQGTKLEIK |
| SEQ ID NO: | VH | QVQLVQSGAEVKKPGSSVKVSCKASGYSFTTYYIHWVRQAP |
| 213 | | GQGLEWMGWFSPGSGNTKYNEKFKGRVTITADTSTSTAYME |
| | | LSSLRSEDTAVYYCAVSYYSYDVLDYWGQGTTVTVSS |

A-H.49

| | | |
|---|---|---|
| SEQ ID NO: | VH + VL | QVQLVQSGAEVKKPGSSVKVSCKASGYSFTTYYIHWVRQAP |
| 214 | | GQGLEWMGWFSPGSGNTKYNEKFKGRVTITADTSTSTAYME |
| | | LSSLRSEDTAVYYCAGSYYSYDVLDYWGQGTTVTVSSGGGG |
| | | SGGGGSGGGGSGGGGSDIQMTQSPSFLSASVGDRVTITCKAS |
| | | QNVGINVVWHQQKPGKAPKALIYSSSHRYSGVPSRFSGSGSG |
| | | TEFTLTISSLQPEDFATYFCQQFKSYPLTFGQGTKLEIK |
| SEQ ID NO: | VH | QVQLVQSGAEVKKPGSSVKVSCKASGYSFTTYYIHWVRQAP |
| 215 | | GQGLEWMGWFSPGSGNTKYNEKFKGRVTITADTSTSTAYME |
| | | LSSLRSEDTAVYYCAGSYYSYDVLDYWGQGTTVTVSS |

A-H.50

| | | |
|---|---|---|
| SEQ ID NO: | VH + VL | QVQLVQSGAEVKKPGSSVKVSCKASGYSFTTYYIHWVRQAP |
| 216 | | GQGLEWMGRIFPGSGNIKYNEKFKGRVTITADTSTSTAYMEL |
| | | SSLRSEDTAVYYCAGSYYSYDVLDYWGQGTTVTVSSGGGGS |
| | | GGGGSGGGGSGGGGSDIQMTQSPSFLSASVGDRVTITCKASQ |
| | | NVGINVVWHQQKPGKAPKALIYSSSHRYSGVPSRFSGSGSGT |
| | | EFTLTISSLQPEDFATYFCQQFKSYPLTFGQGTKLEIK |
| SEQ ID NO: | VH | QVQLVQSGAEVKKPGSSVKVSCKASGYSFTTYYIHWVRQAP |
| 217 | | GQGLEWMGRIFPGSGNIKYNEKFKGRVTITADTSTSTAYMEL |
| | | SSLRSEDTAVYYCAGSYYSYDVLDYWGQGTTVTVSS |

A-H.51

| | | |
|---|---|---|
| SEQ ID NO: | VH + VL | QVQLVQSGAEVKKPGSSVKVSCKASGYSFTTYYIHWVRQAP |
| 218 | | GQGLEWMGWFFPGSGNIKYNEKFKGRVTITADTSTSTAYME |
| | | LSSLRSEDTAVYYCAGSIYSAGVLDYWGQGTTVTVSSGGGGS |
| | | GGGGSGGGGSGGGGSDIQMTQSPSFLSASVGDRVTITCKASQ |
| | | NVGINVVWHQQKPGKAPKALIYSSSHRYSGVPSRFSGSGSGT |
| | | EFTLTISSLQPEDFATYFCQQFKSYPLTFGQGTKLEIK |
| SEQ ID NO: | VH | QVQLVQSGAEVKKPGSSVKVSCKASGYSFTTYYIHWVRQAP |
| 219 | | GQGLEWMGWFFPGSGNIKYNEKFKGRVTITADTSTSTAYME |
| | | LSSLRSEDTAVYYCAGSIYSAGVLDYWGQGTTVTVSS |

A-H.52

| | | |
|---|---|---|
| SEQ ID NO: | VH + VL | QVQLVQSGAEVKKPGSSVKVSCKASGYSFTLGYIHWVRQAP |
| 220 | | GQGLEWMGWFFPGSGNIKYNEKFKGRVTITADTSTSTAYME |
| | | LSSLRSEDTAVYYCAGSYYSYDVLDYWGQGTTVTVSSGGGG |
| | | SGGGGSGGGGSGGGGSDIQMTQSPSFLSASVGDRVTITCKAS |
| | | QNVGINVVWHQQKPGKAPKALIYSSSHRYSGVPSRFSGSGSG |
| | | TEFTLTISSLQPEDFATYFCQQFKSYPLTFGQGTKLEIK |
| SEQ ID NO: | VH | QVQLVQSGAEVKKPGSSVKVSCKASGYSFTLGYIHWVRQAP |
| 221 | | GQGLEWMGWFFPGSGNIKYNEKFKGRVTITADTSTSTAYME |
| | | LSSLRSEDTAVYYCAGSYYSYDVLDYWGQGTTVTVSS |

A-H.53

| | | |
|---|---|---|
| SEQ ID NO: | VH + VL | QVQLVQSGAEVKKPGSSVKVSCKASGYSFRLTYIHWVRQAP |
| 222 | | GQGLEWMGWFFPGSGNIKYNEKFKGRVTITADTSTSTAYME |
| | | LSSLRSEDTAVYYCAGSYYSYDVLDYWGQGTTVTVSSGGGG |
| | | SGGGGSGGGGSGGGGSDIQMTQSPSFLSASVGDRVTITCKAS |
| | | QNVGINVVWHQQKPGKAPKALIYSSSHRYSGVPSRFSGSGSG |
| | | TEFTLTISSLQPEDFATYFCQQFKSYPLTFGQGTKLEIK |
| SEQ ID NO: | VH | QVQLVQSGAEVKKPGSSVKVSCKASGYSFRLTYIHWVRQAP |
| 223 | | GQGLEWMGWFFPGSGNIKYNEKFKGRVTITADTSTSTAYME |
| | | LSSLRSEDTAVYYCAGSYYSYDVLDYWGQGTTVTVSS |

A-H.54

| | | |
|---|---|---|
| SEQ ID NO: | VH + VL | QVQLVQSGAEVKKPGSSVKVSCKASGYSFHNWYIHWVRQA |
| 224 | | PGQGLEWMGWFFPGSGNIKYNEKFKGRVTITADTSTSTAYM |
| | | ELSSLRSEDTAVYYCAGSYYSYDVLDYWGQGTTVTVSSGGG |
| | | GSGGGGSGGGGSGGGGSDIQMTQSPSFLSASVGDRVTITCKA |
| | | SQNVGINVVWHQQKPGKAPKALIYSSSHRYSGVPSRFSGSGS |
| | | GTEFTLTISSLQPEDFATYFCQQFKSYPLTFGQGTKLEIK |
| SEQ ID NO: | VH | QVQLVQSGAEVKKPGSSVKVSCKASGYSFHNWYIHWVRQA |
| 225 | | PGQGLEWMGWFFPGSGNIKYNEKFKGRVTITADTSTSTAYM |
| | | ELSSLRSEDTAVYYCAGSYYSYDVLDYWGQGTTVTVSS |

A-H.55 antibody

| | | |
|---|---|---|
| SEQ ID NO: 3 | HC CDR1 (Combined) | GYSFTTYYIH |
| SEQ ID NO: 4 | HC CDR2 (Combined) | WFFPGSGNIKYNEKFKG |
| SEQ ID NO: 5 | HC CDR3 (Combined) | SYYSYDVLDY |
| SEQ ID NO: 45 | HC CDR1 (Kabat) | TYYIH |
| SEQ ID NO: 46 | HC CDR2 (Kabat) | WFFPGSGNIKYNEKFKG |
| SEQ ID NO: 47 | HC CDR3 (Kabat) | SYYSYDVLDY |
| SEQ ID NO: 48 | HC CDR1 (Chothia) | GYSFTTY |
| SEQ ID NO: 49 | HC CDR2 (Chothia) | FPGSGN |
| SEQ ID NO: 50 | HC CDR3 (Chothia) | SYYSYDVLDY |
| SEQ ID NO: | VH | QVQLVQSGAEVKKPGSSVKVSCKASGYSFTTYYIHWVRQAP |
| 1100 | | GQGLEWMGWFFPGSGNIKYNEKFKGRVTITADTSTSTAYME |
| | | LSSLRSEDTAVYYCAGSYYSYDVLDYWGQGTTVTVSS |
| SEQ ID NO: 6 | LC CDR1 (Combined) | KASQNVGINVV |
| SEQ ID NO: 7 | LC CDR2 (Combined) | SSSHRYS |
| SEQ ID NO: 8 | LC CDR3 (Combined) | QQFKSYPLT |
| SEQ ID NO: 51 | LC CDR1 (Kabat) | KASQNVGINVV |
| SEQ ID NO: 52 | LC CDR2 (Kabat) | SSSHRYS |
| SEQ ID NO: 53 | LC CDR3 (Kabat) | QQFKSYPLT |
| SEQ ID NO: 54 | LC CDR1 (Chothia) | KASQNVGINVV |
| SEQ ID NO: 55 | LC CDR2 (chothia) | SSSHRYS |
| SEQ ID NO: 56 | LC CDR3 (chothia) | QQFKSYPLT |
| SEQ ID NO: | VL | QSVLTQPPSVSEAPRQRVTISCKASQNVGINVVWHQQLPGKA |
| 1101 | | PKALIYSSSHRYSGVSDRFSGSGSGTSFSLAISGLQSEDEADYF |
| | | CQQFKSYPLTFGTGTKVTVL |

A-H.56

| | | |
|---|---|---|
| SEQ ID NO: | VH + VL (ScFv) | QVQLVQSGAEVKKPGSSVKVSCKASGHDFDKFYIHWVRQAP |
| 1309 | | GQGLEWMGRVSAGSGNVKYNEKFKGRVTITADTSTSTAYME |
| | | LSSLRSEDTAVYYCAGSYYSYDVLDYWGQGTTVTVSSGGGG |
| | | SGGGGSGGGGSGGGGSDIQMTQSPSFLSASVGDRVTITCKAS |
| | | QNVGNRVAWYQQKPGKAPKALIYSSSHRYKGVPSRFSGSGS |
| | | GTEFTLTISSLQPEDFATYFCQQFKSYPLTFGQGTKLEIK |

A-H.57

| | | |
|---|---|---|
| SEQ ID NO: | VH + VL (ScFv) | QVQLVQSGABVKKPGSSVKVSCKASGHDFRLTYIHWVRQAP |
| 1326 | | GQGLEWMGRVSAGSGNTKYNEKFKGRVTITADTSTSTAYME |
| | | LSSLRSEDTAVYYCAVSYYSYDVLDYWGQGTTVTVSSGGGG |
| | | SGGGGSGGGGSGGGGSDIQMTQSPSFLSASVGDRVTITCKAS |
| | | QNVGDRVVWHQQKPGKAPKALIYSSSHRYKGVPSRFSGSGS |
| | | GTEFTLTISSLQPEDFATYFCQQFKSYPLTFGQGTKLEIK |

A-H.58

| | | |
|---|---|---|
| SEQ ID NO: | VH + VL (ScFv) | QVQLVQSGAEVKKPGSSVKVSCKASGHDFRLTYIHWVRQAP |
| 1327 | | GQGLEWMGRVSAGSGNVKYNEKFKGRVTITADTSTSTAYME |
| | | LSSLRSEDTAVYYCAVSYYSYDVLDYWGQGTTVTVSSGGGG |
| | | SGGGGSGGGGSGGGGSDIQMTQSPSFLSASVGDRVTITCKAS |
| | | QNVGNRVVWHQQKPGKAPKALIYSSSHRYKGVPSRFSGSGS |
| | | GTEFTLTISSLQPEDFATYFCQQFKSYPLTFGQGTKLEIK |

A-H.59

| | | |
|---|---|---|
| SEQ ID NO: | VH + VL (ScFv) | QVQLVQSGAEVKKPGSSVKVSCKASGHDFRLTYIHWVRQAP |
| 1328 | | GQGLEWMGRIYAGSGNVKYNEKFKGRVTITADTSTSTAYME |
| | | LSSLRSEDTAVYYCAVSYYSYDVLDYWGQGTTVTVSSGGGG |
| | | SGGGGSGGGGGGGGSDIQMTQSPSFLSASVGDRVTITCKAS |
| | | QNVADRVVWHQQKPGKAPKALIYSSSHRYKGVPSRFSGSGS |
| | | GTEFTLTISSLQPEDFATYFCQQFKSYPLTFGQGTKLEIK |

A-H.60

| | | |
|---|---|---|
| SEQ ID NO: | VH + VL (ScFv) | QVQLVQSGAEVKKPGSSVKVSCKASGHDFKLTYIHWVRQAP |
| 1329 | | GQGLEWMGRVSAGSQNTKYNEKFKGRVTITADTSTSTAYME |
| | | LSSLRSEDTAVYYCAVSYYSYDVLDYWGQGTTVTVSSGGGG |
| | | SGGGGSGGGGSGGGGSDIQMTQSPSFLSASVGDRVTITCKAS |
| | | QNVGDRVAWHQQKPGKAPKALIYSSSHRYKGVPSRFSGSGS |
| | | GTEFTLTISSLQPEDFATYFCQQFKSYPLTFGQGTKLEIK |

A-H.61

| | | |
|---|---|---|
| SEQ ID NO: | VH + VL (ScFv) | QVQLVQSGAEVKKPGSSVKVSCKASGHDFKLTYIHWVRQAP |
| 1330 | | GQGLEWMGRVSAGSGNTKYNEKFKGRVTITADTSTSTAYME |
| | | LSSLRSEDTAVYYCAVSYYSYDVLDYWGQGTTVTVSSGGGG |
| | | SGGGGSGGGGSGGGGSDIQMTQSPSFLSASVGDRVTITCKAS |
| | | QNVDNRVAWHQQKPGKAPKALIYSSSHRYKGVPSRFSGSGS |
| | | GTEFTLTISSLQPEDFATYFCQQFKSYPLTFGQGTKLEIK |

A-H.62

| | | |
|---|---|---|
| SEQ ID NO: | VH + VL (ScFv) | QVQLVQSGAEVKKPGSSVKVSCKASGHDFRLTYIHWVRQAP |
| 1331 | | GQGLEWMGRVSAGSGNVKYNEKFKGRVTITADTSTSTAYME |
| | | LSSLRSEDTAVYYCAVSYYSYDVLDYWGQGTTVTVSSGGGG |
| | | SGGGGSGGGGSGGGGSDIQMTQSPSFLSASVGDRVTITCKAS |
| | | QNVADRVVWHQQKPGKAPKALIYSSSHRYKGVPSRFSGSGS |
| | | GTEFTLTISSLQPEDFATYFCQQFKSYPLTFGQGTKLEIK |

A-H.63

| | | |
|---|---|---|
| SEQ ID NO: | VH + VL (ScFv) | QVQLVQSGAEVKKPGSSVKVSCKASGHDFRLTYIHWVRQAP |
| 1332 | | GQGLEWMGRVYAGSGNTKYNEKFKGRVTITADTSTSTAYM |
| | | ELSSLRSEDTAVYYCAVSYYSYDVLDYWGQGTTVTVSSGGG |
| | | GSGGGGSGGGGSGGGGSDIQMTQSPSFLSASVGDRVTITCKA |
| | | SQNVEDRVVWHQQKPGKAPKALIYSSSHRYKGVPSRFSGSGS |
| | | GTEFTLTISSLQPEDFATYFCQQFKSYPLTFGQGTKLEIK |

A-H.64

| | | |
|---|---|---|
| SEQ ID NO: | VH + VL (ScFv) | QVQLVQSGAEVKKPGSSVKVSCKASGHDFKLTYIHWVRQAP |
| 1333 | | GQGLEWMGRVSAGSGNTKYNEKFKGRVTITADTSTSTAYME |
| | | LSSLRSEDTAVYYCAVSYYSYDVLDYWGQGTTVTVSSGGGG |
| | | SGGGGSGGGGSGGGGSDIQMTQSPSFLSASVGDRVTITCKAS |
| | | QNVADRVVWHQQKPGKAPKALIYSSSHRYKGVPSRFSGSGS |
| | | GTEFTLTISSLQPEDFATYFCQQFKSYPLTFGQGTKLEIK |

A-H.65

| | | |
|---|---|---|
| SEQ ID NO: | VH + VL (ScFv) | QVQLVQSGAEVKKPGSSVKVSCKASGHDFKLTYIHWVRQAP |
| 1334 | | GQGLEWMGRISAGSGNTKYNEKFKGRVTITADTSTSTAYME |
| | | LSSLRSEDTAVYYCAVSYYSYDVLDYWGQGTTVTVSSGGGG |
| | | SGGGGSGGGGSGGGGSDIQMTQSPSFLSASVGDRVTITCKAS |
| | | QNVGDRVVWHQQKPGKAPKALIYSSSHRYKGVPSRFSGSGS |
| | | GTEFTLTISSLQPEDFATYFCQQFKSYPLTFGQGTKLEIK |

A-H.66

| | | |
|---|---|---|
| SEQ ID NO: | VH + VL (ScFv) | QVQLVQSGAEVKKPGSSVKVSCKASGHDFKLTYIHWVRQAP |
| 1335 | | GQGLEWMGRIYAGSGNTKYNEKFKGRVTITADTSTSTAYME |
| | | LSSLRSEDTAVYYCAVSYYSYDVLDYWGQGTTVTVSSGGGG |
| | | SGGGGSGGGGSGGGGSDIQMTQSPSFLSASVGDRVTITCKAS |
| | | QNVGDRVVWHQQKPGKAPKALIYSSSHRYKGVPSRFSGSGS |
| | | GTEFTLTISSLQPEDFATYFCQQFKSYPLTFGQGTKLEIK |

A-H.67

| | | |
|---|---|---|
| SEQ ID NO: | VH + VL (ScFv) | QVQLVQSGAEVKKPGSSVKVSCKASGTDFKLTYIHWVRQAP |
| 1336 | | GQGLEWMGRIFPGSGNVKYNEKFKGRVTITADTSTSTAYME |
| | | LSSLRSEDTAVYYCAVSYYSYDVLDYWGQGTTVTVSSGGGG |
| | | SGGGGSGGGGSGGGGSDIQMTQSPSFLSASVGDRVTITCKAS |
| | | QNVDNRVAWYQQKPGKAPKALIYSSSHRYKGVPSRFSGSGS |
| | | GTEFTLTISSLQPEDFATYFCQQFKSYPLTFGQGTKLEIK |

A-H.68

| | | |
|---|---|---|
| SEQ ID NO: | VH + VL (ScFv) | QVQLVQSGAEVKKPGSSVKVSCKASGHDFRLTYIHWVRQAP |
| 1337 | | GQGLEWMGRISAGSGNVKYNEKFKGRVTITADTSTSTAYME |
| | | LSSLRSEDTAVYYCAVSYYSYDVLDYWGQGTTVTVSSGGGG |
| | | SGGGGSGGGGSGGGGSDIQMTQSPSFLSASVGDRVTITCKAS |
| | | QNVADRVAWYQQKPGKAPKALIYSSSHRYKGVPSRFSGSGS |
| | | GTEFTLTISSLQPEDFATYFCQQFKSYPLTFGQGTKLEIK |

A-H.69 (also referred to as A-H.13)

| | | |
|---|---|---|
| SEQ ID NO: | VH + VL (ScFv) | QVQLVQSGAEVKKPGSSVKVSCKASGTDFKLTYIHWVRQAP |
| 110 | | GQGLEWMGRIFPGSGNVKYNEKFKGRVTITADTSTSTAYME |
| | | LSSLRSEDTAVYYCAGSYYSYDVLDYWGQGTTVTVSSGGGG |
| | | SGGGGSGGGGSGGGGSDIQMTQSPSFLSASVGDRVTITCKAS |
| | | QNVDNRVAWYQQKPGKAPKALIYSSSHRYKGVPSRFSGSGS |
| | | GTEFTLTISSLQPEDFATYFCQQFKSYPLTFGQGTKLEIK |

A-H humanized-matured VH

| | | |
|---|---|---|
| SEQ ID NO: | VH-humanized matured | QVQLVQSGAEVKKPGSSVKVSCKASGTDFKLTYIHWVRQAP |
| 1310 | 1 | GQGLEWMGRIFPGSGNVKYNEKFKGRVTITADTSTSTAYME |
| | | LSSLRSEDTAVYYCAGSYYSYDVLDYWGQGTTVTVSS |
| SEQ ID NO: | VH-humanized matured | QVQLVQSGAEVKKPGSSVKVSCKASGTDFKLTYIHWVRQAP |
| 1311 | 2 | GQGLEWMGRIFPGSGNVKYNEKFKGRVTITADTSTSTAYME |
| | | LSSLRSEDTAVYYCAVSYYSYDVLDYWGQGTTVTVSS |
| SEQ ID NO: | VH-humanized matured | QVQLVQSGAEVKKPGSSVKVSCKASGHDFRLTYIHWVRQAP |
| 1312 | 3 | GQGLEWMGRISAGSGNVKYNEKFKGRVTITADTSTSTAYME |
| | | LSSLRSEDTAVYYCAVSYYSYDVLDYWGQGTTVTVSS |

A-H humanized-matured VL

| | | |
|---|---|---|
| SEQ ID NO: | VL-humanized matured | DIQMTQSPSFLSASVGDRVTITCKASQNVDNRVAWYQQKPG |
| 1313 | 1 | KAPKALIYSSSHRYKGVPSRFSGSGSGTEFTLTISSLQPEDFAT |
| | | YFCQQFKSYPLTFGQGTKLEIK |
| SEQ ID NO: | VL-humanized matured | DIQMTQSPSFLSASVGDRVTITCKASQNVADRVAWYQQKPG |
| 1314 | 2 | KAPKALIYSSSHRYKGVPSRFSGSGSGTEFTLTISSLQPEDFAT |
| | | YFCQQFKSYPLTFGQGTKLEIK |

A-H.70

| | | |
|---|---|---|
| SEQ ID NO: | HC CDR1 | GHDFRLTYIH |
| 3650 | | |
| SEQ ID NO: | HC CDR2 | RVSAGSGNVKYNEKFKG |
| 3651 | | |
| SEQ ID NO: 5 | HC CDR3 | SYYSYDVLDY |
| SEQ ID NO: | LC CDR1 | KASQNVGNRVV |
| 3652 | | |
| SEQ ID NO: | LC CDR2 | SSSHRYK |
| 3653 | | |
| SEQ ID NO: 8 | LC CDR3 | QQFKSYPLT |
| SEQ ID NO: | VH | QVQLVQSGAEVKKPGSSVKVSCKASGHDFRLTYIHWVRQAP |
| 1346 | (CDRs underlined) | GQGLEWMGRVSAGSGNVKYNEKFKGRVTITADTSTSTAYME |
| | | LSSLRSEDTAVYYCAVSYYSYDVLDYWGQGTTVTVSS |
| SEQ ID NO: | VL | DIQMTQSPSFLSASVGDRVTITCKASQNVGNRVVWHQQKPG |
| 1347 | (CDRs underlined) | KAPKALIYSSSHRYKGVPSRFSGSGSGTEFTLTISSLQPEDFAT |
| | | YFCQQFKSYPLTFGQGTKLEIK |

A-H.71

| | | |
|---|---|---|
| SEQ ID NO: | HC CDR1 | GHDFRLTYIH |
| 3650 | | |
| SEQ ID NO: | HC CDR2 | RIYAGSGNVKYNEKFKG |
| 3654 | | |
| SEQ ID NO: 5 | HC CDR3 | SYYSYDVLDY |
| SEQ ID NO: | LC CDR1 | KASQNVADRVV |
| 3655 | | |
| SEQ ID NO: | LC CDR2 | SSSHRYK |
| 3653 | | |
| SEQ ID NO: 8 | LC CDR3 | QQFKSYPLT |
| SEQ ID NO: | VH | QVQLVQSGAEVKKPGSSVKVSCKASGHDFRLTYIHWVRQAP |
| 1348 | (CDRs underlined) | GQGLEWMGRIYAGSGNVKYNEKFKGRVTITADTSTSTAYME |
| | | LSSLRSEDTAVYYCAVSYYSYDVLDYWGQGTTVTVSS |
| SEQ ID NO: | VL | DIQMTQSPSFLSASVGDRVTITCKASQNVADRVVWHQQKPG |
| 1349 | (CDRs underlined) | KAPKALIYSSSHRYKGVPSRFSGSGSGTEFTLTISSLQPEDFAT |
| | | YFCQQFKSYPLTFGQGTKLEIK |

A-H.72

| | | |
|---|---|---|
| SEQ ID NO: | HC CDR1 | GHDFKLTYIH |
| 3656 | | |
| SEQ ID NO: | HC CDR2 | RVSAGSQNTKYNEKFKG |
| 3657 | | |
| SEQ ID NO: 5 | HC CDR3 | SYYSYDVLDY |
| SEQ ID NO: | LC CDR1 | KASQNVGDRVA |
| 3658 | | |
| SEQ ID NO: | LC CDR2 | SSSHRYK |
| 3653 | | |
| SEQ ID NO: 8 | LC CDR3 | QQFKSYPLT |
| SEQ ID NO: | VH | QVQLVQSGAEVKKPGSSVKVSCKASGHDFKLTYIHWVRQAP |
| 1350 | (CDRs underlined) | GQGLEWMGRVSAGSGNTKYNEKFKGRVTITADTSTSTAYME |
| | | LSSLRSEDTAVYYCAVSYYSYDVLDYWGQGTTVTVSS |
| SEQ ID NO: | VL | DIQMTQSPSFLSASVGDRVTITCKASQNVGDRVAWHQQKPG |
| 1351 | (CDRs underlined) | KAPKALIYSSSHRYKGVPSRFSGSGSGTEFTLTISSLQPEDFAT |
| | | YFCQQFKSYPLTFGQGTKLEIK |

A-H.73

| | | |
|---|---|---|
| SEQ ID NO: | HC CDR1 | GHDFKLTYIH |
| 3656 | | |
| SEQ ID NO: | HC CDR2 | RVSAGSGNTKYNEKFKG |
| 3657 | | |
| SEQ ID NO: 5 | HC CDR3 | SYYSYDVLDY |
| SEQ ID NO: | LC CDR1 | KASQNVDNRVA |
| 3667 | | |
| SEQ ID NO: | LC CDR2 | SSSHRYK |
| 3653 | | |
| SEQ ID NO: 8 | LC CDR3 | QQFKSYPLT |
| SEQ ID NO: | VH | QVQLVQSGAEVKKPGSSVKVSCKASGHDFKLTYIHWVRQAP |
| 1350 | (CDRs underlined) | GQGLEWMGRVSAGSQNTKYNEKFKGRVTITADTSTSTAYME |
| | | LSSLRSEDTAVYYCAVSYYSYDVLDYWGQGTTVTVSS |
| SEQ ID NO: | VL | DIQMTQSPSFLSASVGDRVTITCKASQNVDNRVAWHQQKPG |
| 1353 | (CDRs underlined) | KAPKALIYSSSHRYKGVPSRFSGSGSGTEFTLTISSLQPEDFAT |
| | | YFCQQFKSYPLTFGQGTKLEIK |

A-H.74

| | | |
|---|---|---|
| SEQ ID NO: | HC CDR1 | GHDFRLTYIH |
| 3650 | | |
| SEQ ID NO: | HC CDR2 | RVSAGSGNVKYNEKFKG |
| 3651 | | |
| SEQ ID NO: 5 | HC CDR3 | SYYSYDVLDY |
| SEQ ID NO: | LC CDR1 | KASQNVADRVV |
| 3655 | | |
| SEQ ID NO: | LC CDR2 | SSSHRYK |
| 3653 | | |
| SEQ ID NO: 8 | LC CDR3 | QQFKSYPLT |
| SEQ ID NO: | VH | QVQLVQSGAEVKKPGSSVKVSCKASGHDFRLTYIHWVRQAP |
| 1346 | (CDRs underlined) | GQGLEWMGRVSAGSGNVKYNEKFKGRVTITADTSTSTAYME |
| | | LSSLRSEDTAVYYCAVSYYSYDVLDYWGQGTTVTVSS |
| SEQ ID NO: | VL | DIQMTQSPSFLSASVGDRVTITCKASQNVADRVVWHQQKPG |
| 1349 | (CDRs underlined) | KAPKALIYSSSHRYKQVPSRFSGSGSGTEFTLTISSLQPEDFAT |
| | | YFCQQFKSYPLTFGQGTKLEIK |

A-H.75

| | | |
|---|---|---|
| SEQ ID NO: | HC CDR1 | GHDFRLTYIH |
| 3650 | | |
| SEQ ID NO: | HC CDR2 | RVYAGSGNTKYNEKFKG |
| 3659 | | |
| SEQ ID NO: 5 | HC CDR3 | SYYSYDVLDY |
| SEQ ID NO: | LC CDR1 | KASQNVEDRVV |
| 3660 | | |
| SEQ ID NO: | LC CDR2 | SSSHRYK |
| 3653 | | |
| SEQ ID NO: 8 | LC CDR3 | QQFKSYPLT |
| SEQ ID NO: | VH | QVQLVQSGAEVKKPGSSVKVSCKASGHDFRLTYIHWVRQAP |
| 1356 | (CDRs underlined) | GQGLEWMGRVYAGSGNTKYNEKFKGRVTITADTSTSTAYM |
| | | ELSSLRSEDTAVYYCAVSYYSYDVLDYWGQGTTVTVSS |
| SEQ ID NO: | VL | DIQMTQSPSFLSASVGDRVTITCKASQNVEDRVVWHQQKPG |
| 1357 | (CDRs underlined) | KAPKALIYSSSHRYKGVPSRFSGSGSGTEFTLTISSLQPEDFAT |
| | | YFCQQFKSYPLTFGQGTKLEIK |

A-H.76

| | | |
|---|---|---|
| SEQ ID NO: | HC CDR1 | GHDFKLTYIH |
| 3656 | | |
| SEQ ID NO: | HC CDR2 | RVSAGSGNTKYNEKFKG |
| 3657 | | |
| SEQ ID NO: 5 | HC CDR3 | SYYSYDVLDY |
| SEQ ID NO: | LC CDR1 | KASQNVADRVV |
| 3655 | | |
| SEQ ID NO: | LC CDR2 | SSSHRYK |
| 3653 | | |
| SEQ ID NO: 8 | LC CDR3 | QQFKSYPLT |
| SEQ ID NO: | VH | QVQLVQSGAEVKKPGSSVKVSCKASGHDFKLTYIHWVRQAP |
| 1350 | (CDRs underlined) | GQGLEWMGRVSAGSQNTKYNEKFKGRVTITADTSTSTAYME |
| | | LSSLRSEDTAVYYCAVSYYSYDVLDYWGQGTTVTVSS |
| SEQ ID NO: | VL | DIQMTQSPSFLSASVGDRVTITCKASQNVADRVVWHQQKPG |
| 1349 | (CDRs underlined) | KAPKALIYSSSHRYKGVPSRFSGSGSGTEFTLTISSLQPEDFAT |
| | | YFCQQFKSYPLTFGQGTKLEIK |

A-H.77

| | | |
|---|---|---|
| SEQ ID NO: | HC CDR1 | GHDFKLTYIH |
| 3656 | | |
| SEQ ID NO: | HC CDR2 | RISAGSGNTKYNEKFKG |
| 3661 | | |
| SEQ ID NO: 5 | HC CDR3 | SYYSYDVLDY |
| SEQ ID NO: | LC CDR1 | KASQNVGDRVV |
| 3662 | | |
| SEQ ID NO: | LC CDR2 | SSSHRYK |
| 3653 | | |
| SEQ ID NO: 8 | LC CDR3 | QQFKSYPLT |
| SEQ ID NO: | VH | QVQLVQSGAEVKKPGSSVKVSCKASGHDEKLTYIHWVRQAP |
| 1360 | (CDRs underlined) | GQGLEWMGRISAGSGNTKYNEKFKGRVTITADTSTSTAYME |
| | | LSSLRSEDTAVYYCAVSYYSYDVLDYWGQGTTVTVSS |
| SEQ ID NO: | VL | DIQMTQSPSFLSASVGDRVTITCKASQNVGDRVVWHQQKPG |
| 1361 | (CDRs underlined) | KAPKALIYSSSHRYKGVPSRFSGSGSGTEFTLTISSLQPEDFAT |
| | | YFCQQFKSYPLTFGQGTKLEIK |

A-H.78

| | | |
|---|---|---|
| SEQ ID NO: | HC CDR1 | GHDFKLTYIH |
| 3656 | | |
| SEQ ID NO: | HC CDR2 | RIYAGSGNTKYNEKFKG |
| 3663 | | |
| SEQ ID NO: 5 | HC CDR3 | SYYSYDVLDY |
| SEQ ID NO: | LC CDR1 | KASQNVGDRVV |
| 3662 | | |
| SEQ ID NO: | LC CDR2 | SSSHRYK |
| 3653 | | |
| SEQ ID NO: 8 | LC CDR3 | QQFKSYPLT |
| SEQ ID NO: | VH | QVQLVQSGAEVKKPGSSVKVSCKASGHDFKLTYIHWVRQAP |
| 1362 | (CDRs underlined) | GQGLEWMGRIYAGSGNTKYNEKFKGRVTITADTSTSTAYME |
| | | LSSLRSEDTAVYYCAVSYYSYDVLDYWGQGTTVTVSS |
| SEQ ID NO: | VL | DIQMTQSPSFLSASVGDRVTITCKASQNVGDRVVWHQQKPG |
| 1361 | (CDRs underlined) | KAPKALIYSSSHRYKGVPSRFSGSGSGTEFTLTISSLQPEDFAT |
| | | YFCQQFKSYPLTFGQGTKLEIK |

A-H.79

| | | |
|---|---|---|
| SEQ ID NO: | HC CDR1 | GHDFKLTYIH |
| 3656 | | |
| SEQ ID NO: | HC CDR2 | RVSAGSGNTKYNEKFKG |
| 3657 | | |
| SEQ ID NO: 5 | HC CDR3 | SYYSYDVLDY |
| SEQ ID NO: | LC CDR1 | RASQNVDNRLG |
| 3666 | | |
| SEQ ID NO: | LC CDR2 | SSSHRYK |
| 3653 | | |
| SEQ ID NO: 8 | LC CDR3 | QQFKSYPLT |
| SEQ ID NO: | VH | QVQLVQSGAEVKKPGSSVKVSCKASGHDFKLTYIHWVRQAP |
| 1350 | (CDRs underlined) | GQGLEWMGRVSAGSGNTKYNEKFKGRVTITADTSTSTAYME |
| | | LSSLRSEDTAVYYCAVSYYSYDVLDYWGQGTTVTVSS |
| SEQ ID NO: | VL | DIQMTQSPSFLSASVGDRVTITCRASQNVDNRLGWHQQKPG |
| 1365 | (CDRs underlined) | KAPKALIYSSSHRYKGVPSRFSGSGSGTEFTLTISSLQPEDFAT |
| | | YFCQQFKSYPLTFGQGTKLEIK |

A-H.80

| | | |
|---|---|---|
| SEQ ID NO: | HC CDR1 | GHDFKLTYIH |
| 3656 | | |
| SEQ ID NO: | HC CDR2 | RVSAGSGNTKYNEKFKQ |
| 3657 | | |
| SEQ ID NO: 5 | HC CDR3 | SYYSYDVLDY |
| SEQ ID NO: | LC CDR1 | KASQNVDNRVA |
| 3667 | | |
| SEQ ID NO: | LC CDR2 | AASSLQK |
| 3668 | | |
| SEQ ID NO: 8 | LC CDR3 | QQFKSYPLT |
| SEQ ID NO: | VH | QVQLVQSGAEVKKPGSSVKVSCKASGHDEKLTYIHWVRQAP |
| 1350 | (CDRs underlined) | GQGLEWMGRVSAGSGNTKYNEKFKGRVTITADTSTSTAYME |
| | | LSSLRSEDTAVYYCAVSYYSYDVLDYWGQGTTVTVSS |
| SEQ ID NO: | VL | DIQMTQSPSFLSASVGDRVTITCKASQNVDNRVAWHQQKPG |
| 1367 | (CDRs underlined) | KAPKALIYAASSLQKGVPSRFSGSGSGTEFTLTISSLQPEDFAT |
| | | YFCQQFKSYPLTFGQGTKLEIK |

A-H.81

| | | |
|---|---|---|
| SEQ ID NO: | HC CDR1 | GHDFKLTYIH |
| 3656 | | |
| SEQ ID NO: | HC CDR2 | RVSAGSGNTKYNEKFKG |
| 3657 | | |
| SEQ ID NO: 5 | HC CDR3 | SYYSYDVLDY |
| SEQ ID NO: | LC CDR1 | KASQNVDNRVA |
| 3667 | | |
| SEQ ID NO: | LC CDR2 | SSSHRYK |
| 3653 | | |
| SEQ ID NO: | LC CDR3 | LQHNSYPLT |
| 3664 | | |
| SEQ ID NO: | VH | QVQLVQSGAEVKKPGSSVKVSCKASGHDFKLTYIHWVRQAP |
| 1350 | (CDRs underlined) | GQGLEWMGRVSAGSGNTKYNEKFKGRVTITADTSTSTAYME |
| | | LSSLRSEDTAVYYCAVSYYSYDVLDYWGQGTTVTVSS |
| SEQ ID NO: | VL | DIQMTQSPSFLSASVGDRVTITCKASQNVDNRVAWHQQKPG |
| 1369 | (CDRs underlined) | KAPKALIYSSSHRYKGVPSRFSGSGSGTEFTLTISSLQPEDFAT |
| | | YFCLQHNSYPLTFGQGTKLEIK |

A-H.82

| | | |
|---|---|---|
| SEQ ID NO: | HC CDR1 | GHDFKLTYIH |
| 3656 | | |
| SEQ ID NO: | HC CDR2 | RVSAGSGNVNYAQKFQG |
| 3665 | | |
| SEQ ID NO: 5 | HC CDR3 | SYYSYDVLDY |
| SEQ ID NO: | LC CDR1 | RASQNVDNRLG |
| 3666 | | |
| SEQ ID NO: | LC CDR2 | SSSHRYK |
| 3653 | | |
| SEQ ID NO: 8 | LC CDR3 | QQFKSYPLT |
| SEQ ID NO: | VH | QVQLVQSGAEVKKPGSSVKVSCKASGHDFKLTYIHWVRQAP |
| 1370 | (CDRs underlined) | GQGLEWMGRVSAGSGNVNYAQKFQGRVTITADTSTSTAYM |
| | | ELSSLRSEDTAVYYCAVSYYSYDVLDYWGQGTTVTVSS |
| SEQ ID NO: | VL | DIQMTQSPSFLSASVGDRVTITCRASQNVDNRLGWHQQKPG |
| 1365 | (CDRs underlined) | KAPKALIYSSSHRYKGVPSRFSGSGSQTEFTLTISSLQPEDFAT |
| | | YFCQQFKSYPLTFGQGTKLEIK |

A-H.83

| | | |
|---|---|---|
| SEQ ID NO: | HC CDR1 | GHDFKLTYIH |
| 3656 | | |
| SEQ ID NO: | HC CDR2 | RVSAGSGNVNYAQKFQG |
| 3665 | | |
| SEQ ID NO: 5 | HC CDR3 | SYYSYDVLDY |
| SEQ ID NO: | LC CDR1 | KASQNVDNRVA |
| 3667 | | |
| SEQ ID NO: | LC CDR2 | AASSLQK |
| 3668 | | |
| SEQ ID NO: 8 | LC CDR3 | QQFKSYPLT |
| SEQ ID NO: | VH | QVQLVQSGAEVKKPGSSVKVSCKASGHDFKLTYIHWVRQAP |
| 1370 | (CDRs underlined) | GQGLEWMGRVSAGSGNVNYAQKFQGRVTITADTSTSTAYM |
| | | ELSSLRSEDTAVYYCAVSYYSYDVLDYWGQGTTVTVSS |
| SEQ ID NO: | VL | DIQMTQSPSFLSASVGDRVTITCKASQNVDNRVAWHQQKPG |
| 1367 | (CDRs underlined) | KAPKALIYAASSLQKGVPSRFSGSGSGTEFTLTISSLQPEDFAT |
| | | YFCQQFKSYPLTFGQGTKLEIK |

A-H.84

| | | |
|---|---|---|
| SEQ ID NO: | HC CDR1 | GHDFKLTYIH |
| 3656 | | |
| SEQ ID NO: | HC CDR2 | RVSAGSGNVNYAQKFQG |
| 3665 | | |
| SEQ ID NO: 5 | HC CDR3 | SYYSYDVLDY |
| SEQ ID NO: | LC CDR1 | KASQNVDNRVA |
| 3667 | | |
| SEQ ID NO: | LC CDR2 | SSSHRYK |
| 3653 | | |
| SEQ ID NO: | LC CDR3 | LQHNSYPLT |
| 3664 | | |
| SEQ ID NO: | VH | QVQLVQSGAEVKKPGSSVKVSCKASGHDFKLTYIHWVRQAP |
| 1370 | (CDRs underlined) | GQGLEWMGRVSAGSGNVNYAQKFQGRVTITADTSTSTAYM |
| | | ELSSLRSEDTAVYYCAVSYYSYDVLDYWGQGTTVTVSS |
| SEQ ID NO: | VL | DIQMTQSPSFLSASVGDRVTITCKASQNVDNRVAWHQQKPG |
| 1369 | (CDRs underlined) | KAPKALIYSSSHRYKGVPSRFSGSGSGTEFTLTISSLQPEDFAT |
| | | YFCLQHNSYPLTFGQGTKLEIK |

A-H.85

| | | |
|---|---|---|
| SEQ ID NO: | HC CDR1 | GHDFRLTYIH |
| 3650 | | |
| SEQ ID NO: | HC CDR2 | RVSAGSQNTKYNEKFKG |
| 3657 | | |
| SEQ ID NO: 5 | HC CDR3 | SYYSYDVLDY |
| SEQ ID NO: | LC CDR1 | KASQNVGDRVV |
| 3662 | | |
| SEQ ID NO: | LC CDR2 | SSSHRYK |
| 3653 | | |
| SEQ ID NO: 8 | LC CDR3 | QQFKSYPLT |
| SEQ ID NO: | VH (CDRs underlined) | QVQLVQSGAEVKKPGSSVKVSCKASGHDFRLTYIHWVRQAP |
| 1344 | | GQGLEWMGRVSAGSGNTKYNEKFKGRVTITADTSTSTAYME |
| | | LSSLRSEDTAVYYCAVSYYSYDVLDYWGQGTTVTVSS |
| SEQ ID NO: | VL | DIQMTQSPSFLSASVGDRVTITCKASQNVGDRVVWHQQKPG |
| 1361 | (CDRs underlined) | KAPKALIYSSSHRYKGVPSRFSGSGSGTEFTLTISSLQPEDFAT |
| | | YFCQQFKSYPLTFGQGTKLEIK |

TABLE 2
Amino acid and nucleotide sequences for murine and humanized antibody molecules which
bind to TCRVB 12, e.g., TCRVB 12-3 or TCRVB 12-4. The antibody molecules include murine
mAb Antibody B and humanized mAb Antibody B-H.1 to B-H.6. The amino acid the heavy and
light chain CDRs, and the amino acid and nucleotide sequences of the heavy and light
chain variable regions, and the heavy and light
chains are shown.
Antibody B (murine), also referred to as 16G8

| | | |
|---|---|---|
| SEQ ID NO: 17 | HC CDR1 (Combined) | GFTFSNFGMH |
| SEQ ID NO: 18 | HC CDR2 (Combined) | YISSGSSTIYYADTLKG |
| SEQ ID NO: 19 | HC CDR3 (Combined) | RGEGAMDY |
| SEQ ID NO: 57 | HC CDR1 (Kabat) | NFGMH |
| SEQ ID NO: 58 | HC CDR2 (Kabat) | YISSGSSTIYYADTLKG |
| SEQ ID NO: 59 | HC CDR3 (Kabat) | RGEGAMDY |
| SEQ ID NO: 60 | HC CDR1 (Chothia) | GFTFSNF |
| SEQ ID NO: 61 | HC CDR2 (Chothia) | SSGSST |
| SEQ ID NO: 62 | HC CDR3 (Chothia) | RGEGAMDY |
| SEQ ID NO: 15 | VH | DVQLVESGGGLVQPGGSRKLSCAASGFTFSNFGMHWVRQ |
| | | APDKGLEWVAYISSGSSTIYYADTLKGRFTISRDNPKNTLFL |
| | | QMTSLRSEDTAMYYCARRGEGAMDYWGQGTSVTVSS |
| SEQ ID NO: 20 | LC CDR1 (Combined) | RASSSVNYIY |
| SEQ ID NO: 21 | LC CDR2 (Combined) | YTSNLAP |
| SEQ ID NO: 22 | LC CDR3 (Combined) | QQFTSSPFT |
| SEQ ID NO: 63 | LC CDR1 (Kabat) | RASSSVNYIY |
| SEQ ID NO: 64 | LC CDR2 (Kabat) | YTSNLAP |
| SEQ ID NO: 65 | LC CDR3 (Kabat) | QQFTSSPFT |
| SEQ ID NO: 66 | LC CDR1 (Chothia) | RASSSVNYIY |
| SEQ ID NO: 67 | LC CDR2 (Chothia) | YTSNLAP |
| SEQ ID NO: 68 | LC CDR3 (Chothia) | QQFTSSPFT |
| SEQ ID NO: 16 | VL | ENVLTQSPAIMSASLGEKVTMSCRASSSVNYIYWYQQKSD |
| | | ASPKLWIYYTSNLAPGVPTRFSGSGSQNSYSLTISSMEGEDA |
| | | ATYYCQQFTSSPFTFGSGTKLEIK |

Antibody B humanized (B-H)
Antibody B-H.1A HC-1

| | | |
|---|---|---|
| SEQ ID NO: 17 | HC CDR1 (Combined) | GFTFSNFGMH |
| SEQ ID NO: 18 | HC CDR2 (Combined) | YISSGSSTIYYADTLKG |
| SEQ ID NO: 19 | HC CDR3 (Combined) | RGEGAMDY |
| SEQ ID NO: | VH | EVQLVESGGQLVQPGGSLRLSCAASGFTFSNFGMHWVRQA |
| 3438 | | PGKGLEWVSYISSGSSTIYYADTLKGRFTISRDNAKNSLYLQ |
| | | MNSLRAEDTAVYYCARRGEGAMDYWGQGTTVTVSS |
| SEQ ID NO: 31 | DNA VH | GAGGTGCAGCTGGTTGAATCTGGCGGAGGATTGGTTCAG |
| | | CCTGGCGGCTCTCTGAGACTGTCTTGTGCCGCTTCTGGCT |
| | | TCACCTTCTCCAACTTCGGCATGCACTGGGTCCGACAGG |
| | | CCCCTGGAAAAGGACTGGAATGGGTGTCCTACATCTCCT |
| | | CCGGCTCCTCCACCATCTACTACGCTGACACCCTGAAGG |
| | | GCAGATTCACCATCTCTCGGGACAACGCCAAGAACTCCC |
| | | TGTACCTGCAGATGAACAGCCTGAGAGCCGAGGACACC |
| | | GCCGTGTACTACTGTGCTAGAAGAGGCGAGGGCGCCATG |
| | | GATTATTGGGGCCAGGGAACCACAGTGACCGTGTCTAGC |

Antibody B-H.1B HC-2

| | | |
|---|---|---|
| SEQ ID NO: 17 | HC CDR1 (Combined) | GFTFSNFGMH |
| SEQ ID NO: 18 | HC CDR2 (Combined) | YISSGSSTIYYADTLKG |
| SEQ ID NO: 19 | HC CDR3 (Combined) | RGEGAMDY |
| SEQ ID NO: 25 | VH | EVQLVESGGGLVQPGGSLRLSCAASGFTFSNFGMHWVRQA |
| | | PGKGLEWVSYISSGSSTIYYADTLKGRFTISRDNSKNTLYLQ |
| | | MNSLRAEDTAVYYCARRGEGAMDYWGQGTTVTVSS |
| SEQ ID NO: 32 | DNA VH | GAGGTGCAGCTGGTTGAATCTGGCGGAGGATTGGTTCAG |
| | | CCTGGCGGCTCTCTGAGACTGTCTTGTGCCGCTTCTGGCT |
| | | TCACCTTCTCCAACTTCGGCATGCACTGGGTCCGACAGG |
| | | CCCCTGGAAAAGGACTGGAATGGGTGTCCTACATCTCCT |
| | | CCGGCTCCTCCACCATCTACTACGCTGACACCCTGAAGG |
| | | GCAGATTCACCATCAGCCGGGACAACTCCAAGAACACCC |
| | | TGTACCTGCAGATGAACTCCCTGAGAGCCGAGGACACCG |
| | | CCGTGTACTACTGTGCTAGAAGAGGCQAGGGCGCCATGG |
| | | ATTATTGGGGCCAGGGAACCACAGTGACCGTGTCTAGC |

Antibody B-H.1C HC-3

| | | |
|---|---|---|
| SEQ ID NO: 17 | HC CDR1 (Combined) | GFTFSNFGMH |
| SEQ ID NO: 18 | HC CDR2 (Combined) | YISSGSSTIYYADTLKG |
| SEQ ID NO: 19 | HC CDR3 (Combined) | RGEGAMDY |
| SEQ ID NO: 23 | VH | QVQLVESGGGVVQPGRSLRLSCAASGFTFSNFGMHWVRQ |
| | | APGKGLEWVAYISSGSSTIYYADTLKGRFTISRDNSKNTLY |
| | | LQMNSLRAEDTAVYYCARRGEGAMDYWGQGTTVTVSS |
| SEQ ID NO: 33 | DNA VH | CAGGTGCAGCTGGTGGAATCTGGTGGCGGAGTTGTGCAG |
| | | CCTGGCAGATCCCTGAGACTGTCTTGTGCCGCCTCTGGCT |
| | | TCACCTTCTCCAACTTCGGCATGCACTGGGTCCGACAGG |
| | | CCCCTGGAAAAGGATTGGAGTGGGTCGCCTACATCTCCT |
| | | CCGGCTCCTCCACCATCTACTACGCTGACACCCTGAAGG |
| | | GCAGATTCACCATCAGCCGGGACAACTCCAAGAACACCC |
| | | TGTACCTGCAGATGAACTCCCTGAGAGCCGAGGACACCG |
| | | CCGTGTACTACTGTQCTAGAAGAGGCGAGGGCGCCATGG |
| | | ATTATTGGGGCCAGGGAACCACAGTGACCGTGTCTAGC |

Antibody B-H.1D LC-1

| | | |
|---|---|---|
| SEQ ID NO: 20 | LC CDR1 (Combined) | RASSSVNYIY |
| SEQ ID NO: 21 | LC CDR2 (Combined) | YTSNLAP |
| SEQ ID NO: 22 | LC CDR3 (Combined) | QQFTSSPFT |
| SEQ ID NO: 26 | VL | DNQLTQSPSFLSASVGDRVTITCRASSSVNYIYWYQQKPGK |
| | | APKLLIYYTSNLAPGVPSRFSGSGSGNEYTLTISSLQPEDFAT |
| | | YYCQQFTSSPFTFGQGTKLEIK |
| SEQ ID NO: 34 | DNA VL | GATAACCAGCTGACCCAGTCTCCTAGCTTCCTGTCTGCCT |
| | | CTGTGGGCGACAGAGTGACAATTACCTGCCGGGCCTCCT |
| | | CCTCCGTGAACTACATCTACTGGTATCAGCAGAAGCCCG |
| | | GCAAGGCCCCTAAGCTGCTGATCTACTACACCTCCAATC |
| | | TGGCCCCTGGCGTGCCCTCTAGATTTTCCGGATCTGGCTC |
| | | CGGCAACGAGTATACCCTGACAATCTCCAGCCTGCAGCC |
| | | TGAGGACTTCGCCACCTACTACTGCCAGCAGTTCACCTC |
| | | CTCTCCATTCACCTTTGGCCAGGGCACCAAGCTGGAAAT |
| | | CAAA |

Antibody B-H.1E LC-2

| | | |
|---|---|---|
| SEQ ID NO: 20 | LC CDR1 (Combined) | RASSSVNYIY |
| SEQ ID NO: 21 | LC CDR2 (Combined) | YTSNLAP |
| SEQ ID NO: 22 | LC CDR3 (Combined) | QQFTSSPFT |
| SEQ ID NO: 27 | VL | DNQLTQSPSSLSASVGDRVTITCRASSSVNYIYWYQQKPGK |
| | | APKLLIYYTSNLAPGVPSRFSGSGSGNDYTLTISSLQPEDFA |
| | | TYYCQQFTSSPFTFGQGTKLEIK |
| SEQ ID NO: 35 | DNA VL | ATAACCAGCTGACCCAGTCTCCTTCCAGCCTGTCTGCTTC |
| | | TGTGGGCGACAGAGTGACAATTACCTGCCGGGCCTCCTC |
| | | CTCCGTGAACTACATCTACTGGTATCAGCAGAAGCCCGG |
| | | CAAGGCCCCTAAGCTGCTGATCTACTACACCTCCAATCT |
| | | GGCCCCTGGCGTGCCCTCTAGATTTTCCGGATCTGGCTCC |
| | | GGCAACGACTATACCCTGACAATCTCCAGCCTGCAGCCT |
| | | GAGGACTTCGCCACCTACTACTGCCAGCAGTTCACCTCC |
| | | TCTCCATTCACCTTTGGCCAGGGCACCAAGCTGGAAATC |
| | | AAA |

Antibody B-H.1F LC-3

| | | |
|---|---|---|
| SEQ ID NO: 20 | LC CDR1 (Combined) | RASSSVNYIY |
| SEQ ID NO: 21 | LC CDR2 (Combined) | YTSNLAP |
| SEQ ID NO: 22 | LC CDR3 (Combined) | QQFTSSPFT |
| SEQ ID NO: 28 | VL | ENVLTQSPATLSVSPGERATLSCRASSSVNYIYWYQQKPGQ |
| | | APRLLIYYTSNLAPGIPARFSGSGSGNEYTLTISSLQSEDFAV |
| | | YYCQQFTSSPFTFGQGTKLEIK |
| SEQ ID NO: 36 | DNA VL | GAGAATGTGCTGACCCAGTCTCCTGCCACACTGTCTGTT |
| | | AGCCCTGGCGAGAGAGCTACCCTGAGCTGCAGAGCCTCT |
| | | TCCTCCGTGAACTACATCTACTGGTATCAGCAGAAGCCC |
| | | GGCCAGGCTCCTAGACTGCTGATCTACTACACCTCCAAT |
| | | CTGGCCCCTGGCATCCCTGCCAGATTTTCCGGATCTGGCT |
| | | CCGGCAACGAGTATACCCTGACCATCTCCAGCCTGCAGT |
| | | CCGAGGACTTTGCTGTGTACTATTGCCAGCAGTTCACAA |
| | | GCAGCCCTTTCACCTTTGGCCAGGGCACCAAGCTGGAAA |
| | | TCAAA |

Antibody B-H.1G LC-4

| | | |
|---|---|---|
| SEQ ID NO: 20 | LC CDR1 (Combined) | RASSSVNYIY |
| SEQ ID NO: 21 | LC CDR2 (Combined) | YTSNLAP |
| SEQ ID NO: 22 | LC CDR3 (Combined) | QQFTSSPFT |
| SEQ ID NO: 29 | VL | QNVLTQPPSASGTPGQRVTISCRASSSVNYIYWYQQLPGTA |
| | | PKLLIYYTSNLAPGVPDRFSGSGSGNSYSLAISGLRSEDEAD |
| | | YYCQQFTSSPFTFGTGTKVTVL |
| SEQ ID NO: 37 | DNA VL | CAGAATGTGCTGACCCAACCTCCTTCCGCCTCTGGCACA |
| | | CCTGGACAGAGAGTGACAATCTCCTGCCGGGCCTCCTCC |
| | | TCCGTGAACTACATCTACTGGTATCAGCAGCTGCCCGGC |
| | | ACCGCTCCTAAACTGCTGATCTACTACACCTCCAATCTG |
| | | GCCCCTGGCGTGCCCGATAGATTTTCCGGATCTGGCTCC |
| | | GGCAACTCCTACAGCCTGGCTATCTCTGGCCTGAGATCT |
| | | GAGGACGAGGCCGACTACTACTGCCAGCAGTTCACCTCC |
| | | TCTCCATTCACCTTTGGCACCGGCACCAAAGTGACAGTT |
| | | CTT |

Antibody B-H.1H LC-5

| | | |
|---|---|---|
| SEQ ID NO: 20 | LC CDR1 (Combined) | RASSSVNYIY |
| SEQ ID NO: 21 | LC CDR2 (Combined) | YTSNLAP |
| SEQ ID NO: 22 | LC CDR3 (Combined) | QQFTSSPFT |
| SEQ ID NO: 30 | VL | SNELTQPPSVSVSPGQTARITCRASSSVNYIYWYQQKSGQA |
| | | PVLVIYYTSNLAPGIPERFSGSGSGNMYTLTISGAQVEDEAD |
| | | YYCQQFTSSPFTFGTGTKVTVL |
| SEQ ID NO: 38 | DNA VL | TCTAATGAGCTGACCCAGCCTCCTTCCGTGTCCGTGTCTC |
| | | CTGGACAGACCGCCAGAATTACCTGCCGGGCCTCCTCCT |
| | | CCGTGAACTACATCTACTGGTATCAGCAGAAGTCCGGCC |
| | | AGGCTCCTGTGCTCGTGATCTACTACACCTCCAATCTGGC |
| | | CCCTGGCATCCCTGAGAGATTCTCCGGATCTGGCTCCGG |
| | | CAACATGTACACCCTGACCATCTCTGGCGCCCAGGTGGA |
| | | AGATGAGGCCGACTACTACTGCCAGCAGTTCACCTCCTC |
| | | TCCATTCACCTTTGGCACCGGCACCAAAGTGACAGTTCT |
| | | T |

Antibody B-H.1

| | | |
|---|---|---|
| SEQ ID NO: | Chain 1: Fc only | METDTLLLWVLLLWVPGSTGDKTHTCPPCPAPELLGGPSV |
| 3280 | | FLFPPKPKDTLMISRTPEVTCVVVDVSHEDPEVKFNWYVD |
| | | GVEVHNAKTKPREEQYNSTYRVVSVLTVLHQDWLNGKEY |
| | | KCKVSNKALPAPIEKTISKAKGQPREPQVYTLPPCREEMTK |
| | | NQVSLWCLVKGFYPSDIAVEWESNGQPENNYKTTPPVLDS |
| | | DGSFFLYSKLTVDKSRWQQGNVFSCSVMHEALHNRFTQKS |
| | | LSLSPGK |
| SEQ ID NO: | Chain 2: humanized | METDTLLLWVLLLWVPGSTGEVQLVESGGGLVQPGGSLRL |
| 3281 | B-H scFv | SCAASGFTFSNFGMHWVRQAPGKGLEWVSYISSGSSTIYYA |
| | | DTLKGRFTISRDNSKNTLYLQMNSLRAEDTAVYYCARRGE |
| | | GAMDYWGQGTTVTVSSGGGGSGGGGSGGGGSGGGGSDN |
| | | QLTQSPSFLSASVGDRVTITCRASSSVNYIYWYQQKPGKAP |
| | | KLLIYYTSNLAPGVPSRFSGSGSGNEYTLTISSLQPEDFATY |
| | | YCQQFTSSPFTFGQGTKLEIKGGGGSDKTHTCPPCPAPELLG |
| | | GPSVFLFPPKPKDTLMISRTPEVTCVVVDVSHEDPEVKFNW |
| | | YVDGVEVHNAKTKPREEQYNSTYRVVSVLTVLHQDWLNG |
| | | KEYKCKVSNKALPAPIEKTISKAKGQPREPQVCTLPPSREE |
| | | MTKNQVSLSCAVKGFYPSDIAVEWESNGQPENNYKTTPPV |
| | | LDSDGSFFLVSKLTVDKSRWQQGNVFSCSVMHEALHNHYT |
| | | QKSLSLSPGKGGGGSGGGGSGLNDIFEAQKIEWHE |
| SEQ ID NO: | scFv | EVQLVESGGGLVQPGGSLRLSCAASGFTFSNFGMHWVRQA |
| 3642 | | PGKGLEWVSYISSGSSTIYYADTLKGRFTISRDNSKNTLYLQ |
| | | MNSLRAEDTAVYYCARRGEGAMDYWGQGTTVTVSSGGG |
| | | GSGGGGSGGGGSGGGGSDNQLTQSPSFLSASVGDRVTITCR |
| | | ASSSVNYIYWYQQKPGKAPKLLIYYTSNLAPGVPSRFSGSG |
| | | SGNEYTLTISSLQPEDFATYYCQQFTSSPFTFGQGTKLEIK |

Antibody B-H.2

| | | |
|---|---|---|
| SEQ ID NO: | scFv | EVQLVESGGGLVQPGGSLRLSCAASGFTFSNFGMHWVRQA |
| 1338 | | PGKGLEWVSYISSGSSTIYYADTLKGRFTISRDNSKNTLYLQ |
| | | MNSLRAEDTAVYYCARRGEGAMDYWGQGTTVTVSSGGG |
| | | GSGGGGSGGGGSGGGGSDNQLTQSPSSLSASVGDRVTITCR |
| | | ASSSVNYIYWYQQKPGKAPKLLIYYTSNLAPGVPSRFSGSG |
| | | SGNDYTLTISSLQPEDFATYYCQQFTSSPFTFGQGTKLEIK |

Antibody B-H.3

| | | |
|---|---|---|
| SEQ ID NO: | scFv | EVQLVESGGGLVQPGGSLRLSCAASQFTFSNFGMHWVRQA |
| 1339 | | PGKGLEWVSYISSGSSTIYYADTLKGRFTISRDNSKNTLYLQ |
| | | MNSLRAEDTAVYYCARRGEGAMDYWGQGTTVTVSSGGG |
| | | GSGGGGSGGGGSGGGGSSNELTQPPSVSVSPGQTARITCRA |
| | | SSSVNYIYWYQQKSGQAPVLVIYYTSNLAPGIPERFSGSGSG |
| | | NMYTLTISGAQVEDEADYYCQQFTSSPFTFGTGTKVTVL |

Antibody B-H.4

| | | |
|---|---|---|
| SEQ ID NO: | scFv | QVQLVESGGGVVQPGRSLRLSCAASGFTFSNFGMHWVRQ |
| 1340 | | APGKGLEWVAYISSGSSTIYYADTLKGRFTISRDNSKNTLY |
| | | LQMNSLRAEDTAVYYCARRGEGAMDYWGQGTTVTVSSG |
| | | GGGSGGGGSGGGGSGGGGSDNQLTQSPSFLSASVGDRVTI |
| | | TCRASSSVNYIYWYQQKPGKAPKLLIYYTSNLAPGVPSRFS |
| | | GSGSGNEYTLTISSLQPEDFATYYCQQFTSSPFTFGQGTKLEI |
| | | K |

Antibody B-H.5

| | | |
|---|---|---|
| SEQ ID NO: | scFv | QVQLVESGGGVVQPGRSLRLSCAASGFTFSNFGMHWVRQ |
| 1341 | | APGKGLEWVAYISSGSSTIYYADTLKGRFTISRDNSKNTLY |
| | | LQMNSLRAEDTAVYYCARRGEGAMDYWGQGTTVTVSSG |
| | | GGGSGGGGSGGGGSGGGGSDNQLTQSPSSLSASVGDRVTI |
| | | TCRASSSVNYIYWYQQKPGKAPKLLIYYTSNLAPGVPSRFS |
| | | GSGSGNDYTLTISSLQPEDFATYYCQQFTSSPFTFGQGTKLE |
| | | IK |

Antibody B-H.6

| | | |
|---|---|---|
| SEQ ID NO: | scFv | QVQLVESGGGVVQPGRSLRLSCAASGFTFSNFGMHWVRQ |
| 1342 | | APGKGLEWVAYISSGSSTIYYADTLKGRFTISRDNSKNTLY |
| | | LQMNSLRAEDTAVYYCARRGEGAMDYWGQGTTVTVSSG |
| | | GGGSGGGGSGGGGSGGGGSSNELTQPPSVSVSPGQTARITC |
| | | RASSSVNYIYWYQQKSGQAPVLVIYYTSNLAPGIPERFSGS |
| | | GSGNMYTLTISGAQVEDEADYYCQQFTSSPFTFGTGTKVTV |
| | | L |

TABLE 3
Constant region amino acid sequences of human IgG heavy chains and human kappa light chain

| | | |
|---|---|---|
| Human kappa | LC | RTVAAPSVFI FPPSDEQLKS GTASVVCLLN NFYPREAKVQ WKVDNALQSG |
| constant region | | NSQESVTEQD SKDSTYSLSS TLTLSKADYE KHKVYACEVT HQGLSSPVTK |
| SEQ ID NO: 39 | | SFNRGEC |
| Human | LC | RTVAAPSVFIFPPSDEQLKSGTASVVCLLNNFYPREAKVQWKVDNALQSGNSQ |
| Immunoglobulin | | ESVTEQDSKDSTYSLSSTLTLSKADYEKHKVYACEVTHQGLSSPVTKSFNRGE |
| kappa constant C | | C |
| region | | |
| SEQ ID NO: 3644 | | |
| IgG4 (S228P) | HC | ASTKGPSVFPLAPCSRSTSESTAALGCLVKDYFPEPVTVSWNSGALTSGVHTFP |
| mutant constant | | AVLQSSGLYSLSSVVTVPSSSLGTKTYTCNVDHKPSNTKVDKRVESKYGPPCPP |
| region (EU | | CPAPEFLGGPSVFLFPPKPKDTLMISRTPEVTCVVVDVSQEDPEVQFNWYVDG |
| Numbering) | | VEVHNAKTKPREEQFNSTYRVVSVLTVLHQDWLNGKEYKCKVSNKGLPSSIE |
| SEQ ID NO: 40 | | KTISKAKGQPREPQVYTLPPSQEEMTKNQVSLTCLVKGFYPSDIAVEWESNGQ |
| | | PENNYKTTPPVLDSDGSFFLYSRLTVDKSRWQEGNVFSCSVMHEALHNHYTQ |
| | | KSLSLSLG |
| IgG1 wild type | HC | ASTKGPSVFPLAPSSKSTSGGTAALGCLVKDYFPEPVTVSWNSGALTSGVHTFP |
| SEQ ID NO: 41 | | AVLQSSGLYSLSSVVTVPSSSLGTQTYICNVNHKPSNTKVDKRVEPKSCDKTHT |
| | | CPPCPAPELLGGPSVFLFPPKPKDTLMISRTPEVTCVVVDVSHEDPEVKFNWYV |
| | | DGVEVHNAKTKPREEQYNSTYRVVSVLTVLHQDWLNGKEYKCKVSNKALPA |
| | | PIEKTISKAKGQPREPQVYTLPPSREEMTKNQVSLTCLVKGFYPSDIAVEWESN |
| | | GQPENNYKTTPPVLDSDGSFFLYSKLTVDKSRWQQGNVFSCSVMHEALHNHY |
| | | TQKSLSLSPGK |
| IgG1 (N297A) | HC | ASTKGPSVFPLAPSSKSTSGGTAALGCLVKDYFPEPVTVSWNSGALTSGVHTFP |
| mutant constant | | AVLQSSGLYSLSSVVTVPSSSLGTQTYICNVNHKPSNTKVDKRVEPKSCDKTHT |
| region (EU | | CPPCPAPELLGGPSVFLFPPKPKDTLMISRTPEVTCVVVDVSHEDPEVKENWYV |
| Numbering) | | DGVEVHNAKTKPREEQYASTYRVVSVLTVLHQDWLNGKEYKCKVSNKALPA |
| SEQ ID NO: 42 | | PIEKTISKAKGQPREPQVYTLPPSREEMTKNQVSLTCLVKGFYPSDIAVEWESN |
| | | GQPENNYKTTPPVLDSDGSFFLYSKLTVDKSRWQQGNVFSCSVMHEALHNHY |
| | | TQKSLSLSPGK |
| IgM constant | HC | GSASAPTLFPLVSCENSPSDTSSVAVGCLAQDFLPDSITFSWKYKNNSDISSTRG |
| delta CDC | | FPSVLRGGKYAATSQVLLPSKDVMQGTDEHVVCKVQHPNGNKEKNVPLPVIA |
| (P311A, P313S) | | ELPPKVSVFVPPRDGFFGNPRKSKLICQATGFSPRQIQVSWLREGKQVGSGVTT |
| SEQ ID NO: 73 | | DQVQAEAKESGPTTYKVTSTLTIKESDWLGQSMFTCRVDHRGLTFQQNASSM |
| | | CVPDQDTAIRVFAIPPSFASIFLTKSTKLTCLVTDLTTYDSVTISWTRQNGEAVK |
| | | THTNISESHPNATFSAVGEASICEDDWNSGERFTCTVTHTDLASSLKQTISRPKG |
| | | VALHRPDVYLLPPAREQLNLRESATITCLVTGFSPADVFVQWMQRGQPLSPEK |
| | | YVTSAPMPEPQAPGRYFAHSILTVSEEEWNTGETYTCVVAHEALPNRVTERTV |
| | | DKSTGKPTLYNVSLVMSDTAGTCY |
| IgGA1 | HC | ASPTSPKVFPLSLCSTQPDGNVVIACLVQGFFPQEPLSVTWSESGQGVTARNFPP |
| SEQ ID NO: 74 | | SQDASGDLYTTSSQLTLPATQCLAGKSVTCHVKHYTNPSQDVTVPCPVPSTPPT |
| | | PSPSTPPTPSPSCCHPRLSLHRPALEDLLLGSEANLTCTLTGLRDASGVTFTWTP |
| | | SSGKSAVQGPPERDLCGCYSVSSVLPGCAEPWNHGKTFTCTAAYPESKTPLTA |
| | | TLSKSGNTFRPEVHLLPPPSEELALNELVTLTCLARGFSPKDVLVRWLQGSQEL |
| | | PREKYLTWASRQEPSQGTTTFAVTSILRVAAEDWKKGDTFSCMVGHEALPLAF |
| | | TQKTIDRLAGKPTHVNVSVVMAEVDGTCY |
| IgGA2 | HC | ASPTSPKVFPLSLDSTPQDGNVVVACLVQGFFPQEPLSVTWSESGQNVTARNFP |
| SEQ ID NO: 75 | | PSQDASGDLYTTSSQLTLPATQCPDGKSVTCHVKHYTNSSQDVTVPCRVPPPPP |
| | | CCHPRLSLHRPALEDLLLGSEANLTCTLTGLRDASGATFTWTPSSGKSAVQGPP |
| | | ERDLCGCYSVSSVLPGCAQPWNHGETFTCTAAHPELKTPLTANITKSQNTFRPE |
| | | VHLLPPPSEELALNELVTLTCLARGFSPKDVLVRWLQGSQELPREKYLTWASR |
| | | QEPSQGTTTYAVTSILRVAAEDWKKGETFSCMVGHEALPLAFTQKTIDRMAG |
| | | KPTHINVSVVMAEADGTCY |
| Human Ig_J chain | HC | MKNHLLFWGVLAVFIKAVHVKAQEDERIVLVDNKCKCARITSRIIRSSEDPNED |
| SEQ ID NO: 76 | | IVERNIRIIVPLNNRENISDPTSPLRTRFVYHLSDLCKKCDPTEVELDNQIVTATQ |
| | | SNICDEDSATETCYTYDRNKCYTAVVPLVYGGETKMVETALTPDACYPD |
| Human | HC | ASTKGPSVFPLAPSSKSTSGGTAALGCLVKDYFPEPVTVSWNSGALTSGVHTFP |
| Immunoglobulin | | AVLQSSGLYSLSSVVTVPSSSLGTQTYICNVNHKPSNTKVDKKVEPKSCDKTHT |
| heavy chain | | CPPCPAPELLGGPSVFLFPPKPKDTLMISRTPEVTCVVVDVSHEDPEVKFNWYV |
| SEQ ID NO: 3645 | | DGVEVHNAKTKPREEQYASTYRVVSVLTVLHQDWLNGKEYKCKVSNKALPA |
| | | PIEKTISKAKGQPREPQVYTLPPSREEMTKNQVSLTCLVKGFYPSDIAVEWESN |
| | | GQPENNYKTTPPVLDSDGSFFLYSKLTVDKSRWQQGNVFSCSVMHEALHNHY |
| | | TQKSLSLSPGK |
| Human | HC | ASTKGPSVFPLAPSSKSTSGGTAALGCLVKDYFPEPVTVSWNSGALTSGVHTFP |
| Immunoglobulin | | AVLQSSGLYSLSSVVTVPSSSLGTQTYICNVNHKPSNTKVDKKVEPKSCDKTHT |
| heavy chain | | CPPCPAPELLGGPSVFLFPPKPKDTLMISRTPEVTCVVVDVSHEDPEVKFNWYV |
| SEQ ID NO: 3646 | | DGVEVHNAKTKPREEQYASTYRVVSVLTVLHQDWLNGKEYKCKVSNKALPA |
| | | PIEKTISKAKGQPREPQVYTLPPSREEMTKNQVSLTCLVKGFYPSDIAVEWESN |
| | | GQPENNYKTTPPVLDSDGSFFLYSKLTVDKSRWQQGNVFSCSVMHEALHNHY |
| | | TQKSLSLSPGKEPEA |
| Human | HC | ASTKGPSVFPLAPSSKSTSGGTAALGCLVKDYFPEPVTVSWNSGALTSGVHTFP |
| Immunoglobulin | | AVLQSSGLYSLSSVVTVPSSSLGTQTYICNVNHKPSNTKVDKRVEPKSCDKTHT |
| heavy chain | | CPPCPAPELLGGPSVFLFPPKPKDTLMISRTPEVTCVVVDVSHEDPEVKFNWYV |
| SEQ ID NO: 3647 | | DGVEVHNAKTKPREEQYNSTYRVVSVLTVLHQDWLNGKEYKCKVSNKALPA |
| | | PIEKTISKAKGQPREPQVYTLPPSREEMTKNQVSLTCLVKGFYPSDIAVEWESN |
| | | GQPENNYKTTPPVLDSDGSFFLYSKLTVDKSRWQQGNVFSCSVMHEALHNHY |
| | | TQKSLSLSPGK |
| Human Fc Knob | HC | DKTHTCPPCPAPELLGGPSVFLFPPKPKDTLMISRTPEVTCVVVDVSHEDPEVK |
| cys N297A | | FNWYVDGVEVHNAKTKPREEQYASTYRVVSVLTVLHQDWLNGKEYKCKVS |
| SEQ ID NO: 3648 | | NKALPAPIEKTISKAKGQPREPQVYTLPPCREEMTKNQVSLWCLVKGFYPSDIA |
| | | VEWESNGQPENNYKTTPPVLDSDGSFFLYSKLTVDKSRWQQGNVFSCSVMHE |
| | | ALHNHYTQKSLSLSPQK |
| Human IgG1 hole | HC | ASTKGPSVFPLAPSSKSTSGGTAALGCLVKDYFPEPVTVSWNSGALTSGVHTFP |
| cys N297A | | AVLQSSGLYSLSSVVTVPSSSLGTQTYICNVNHKPSNTKVDKRVEPKSCDKTHT |
| SEQ ID NO: 3649 | | CPPCPAPELLGGPSVFLFPPKPKDTLMISRTPEVTCVVVDVSHEDPEVKFNWYV |
| | | DGVEVHNAKTKPREEQYASTYRVVSVLTVLHQDWLNGKEYKCKVSNKALPA |
| | | PIEKTISKAKGQPREPQVCTLPPSREEMTKNQVSLSCAVKGFYPSDIAVEWESN |
| | | GQPENNYKTTPPVLDSDGSFFLVSKLTVDKSRWQQGNVFSCSVMHEALHNHY |
| | | TQKSLSLSPGK |

TABLE 4
Exemplary Fc KiH mutations and optional Cysteine mutations

| Position | Knob Mutation | Hole Mutation |
|---|---|---|
| T366 | T366W | T366S |
| L368 | — | L368A |
| Y407 | — | Y407V |

Additional Cysteine Mutations to form a stabilizing disulfide bridge

| Position | Knob CH3 | Hole CH3 |
|---|---|---|
| S354 | S354C | — |
| Y349 | — | Y349C |

TABLE 5
CRS grading

| | |
|---|---|
| Gr1 | Supportive care only |
| Gr2 | IV therapies +/− hospitalization. |
| Gr3 | Hypotension requiring IV fluids or low-dose |
| | vasoactives or hypoxemia requiring oxygen, CPAP, or |
| | BIPAP. |
| Gr4 | Hypotension requiring high-dose vasoactives |
| | or hypoxemia requiring mechanical ventilation. |
| Gr 5 | Death |

TABLE 6
CTCAE v 4.0 CRS grading scale

| CRS grade | Characteristics |
|---|---|
| Grade 1 | Mild; No infusion interruption; No intervention |
| Grade 2 | Infusion interruption indicated but responds |
| | promptly to symptomatic treatment (e.g., |
| | antihistamines, NSAIDS, narcotics, IV fluids); |
| | prophylactic medications indicated for <=24 hrs |
| Grade 3 | Prolonged (e.g., not rapidly responsive to |
| | symptomatic medications and/or brief interruption of |
| | infusion); recurrence of symptoms following |
| | initial improvement, hospitalization indicated for |
| | clinical sequelae (e.g., renal impairment, |
| | pulmonary infiltrates) |
| Grade 4 | Life threatening consequences; pressor or |
| | ventilator support |

TABLE 7
NCI CRS grading scale

| CRS grade | Characteristics |
|---|---|
| Grade 1 | Symptoms are not life threatening and require |
| | symptomatic treatment only; e.g., fever, nausea, |
| | fatigue, headache, myalgias, malaise |
| Grade 2 | Symptoms require and respond to moderate |
| | intervention; Oxygen requirement <40% of |
| | hypotension responsive to fluids or low |
| | dose pressors or Grade 2 organ toxicity |
| Grade 3 | Symptoms require and respond to aggressive |
| | intervention; Oxygen requirement >=40% or |
| | Hypotension requiring high dose or multiple |
| | pressors or grade 3 organ toxicity or grade 4 |
| | transaminitis |
| Grade 4 | Life threatening symptoms Requirement |
| | for ventilator support or Grade 4; organ toxicity |
| | (excluding transaminitis) |

TABLE 8A
List of TCRβV subfamilies and subfamily members

| Reference | | |
|---|---|---|
| in FIG. 5 | Subfamily | Subfamily members |
| A | TCRβ V6 | TCRβ V6-4*01, TCRβ V6-4*02, |
| | Also referred | TCRβ V6-9*01, TCRβ V6-8*01, |
| | to as: | TCRβ V6-5*01, TCRβ V6-6*02, |
| | TCR VB 13.1 | TCRβ V6-6*01, TCRβ V6-2*01, |
| | | TCRβ V6-3*01 or TCRβ V6-1*01. |
| B | TCRβ V10 | TCRβ V10-1*01, TCRβ V10-1*02, |
| | Also | TCRβ V10-3*01 or TCRβ V10-2*01 |
| | referred to as: | |
| | TCRβ V12 | |
| C | TCRβ V12 | TCRβ V12-4*01, TCRβ V12-3*01, |
| | Also referred | or TCRβ V12-5*01 |
| | to as: | |
| | TCRβ V8.1 | |
| D | TCRβ V5 | TCRβ V5-5*01, TCRβ V5-6*01, |
| | | TCRβ V5-4*01, TCRβ V5-8*01, |
| | | TCRβ V5-1*01 |
| E | TCRβ V7 | TCRβ V7-7*01, TCRβ V7-6*01, |
| | | TCRβ V7-8*02, TCRβ V7-4*01, |
| | | TCRβ V7-2*02, TCRβ V7-2*03, |
| | | TCRβ V7-2*01, TCRβ V7-3*01, |
| | | TCRβ V7-9*03, or TCRβ V7-9*01 |
| F | TCRß V11 | TCRβ V11-1*01, TCRβ V11-2*01 |
| | | or TCRβ V11-3*01 |
| G | TCRβ V14 | TCRβ V14*01 |
| H | TCRβ V16 | TCRβ V16*01 |
| I | TCRβ V18 | TCRβ V18*01 |
| J | TCRβ V9 | TCRβ V9*01 or TCRβ V9*02 |
| K | TCRβ V13 | TCRβ V13*01 |
| L | TCRβ V4 | TCRβ V4-2*01, TCRβ V4-3*01, |
| | | or TCRβ V4-1*01 |
| M | TCRβ V3 | TCRβ V3-1*01 |
| N | TCRβ V2 | TCRβ V2*01 |
| O | TCRβ V15 | TCRβ V15*01 |
| P | TCRβ V30 | TCRβ V30*01, or TCRβ V30*02 |
| Q | TCRβ V19 | TCRβ V19*01, or TCRβ V19*02 |
| R | TCRβ V27 | TCRβ V27*01. |
| S | TCRβ V28 | TCRβ V28*01. |
| T | TCRβ V24 | TCRβ V24-1*01 |
| U | TCRβ V20 | TCRβ V20-1*01, or TCRβ V20-1*02 |
| V | TCRβ V25 | TCRβ V25-1*01 |
| W | TCRβ V29 | TCRβ V29-1*01 |

TABLE 8B
Additional TCRβV subfamilies
Subfamily
TCRβ V1
TCRβ V17
TCRβ V21
TCRβ V23
TCRβ V26

TABLE 10A
Exemplary anti-TCRBV antibody molecules

| TRBV | TRBV | Reagents monoclonal antibodies | | |
|---|---|---|---|---|
| vene name | allele name | Clone name and Specificity | Company product | Isotype |
| TRBV2 | TRBV2*01 | IsMMU 546 (TRBV2) | Serotec V BETA 22 | Mouse IgG1 |
| | TRBV2*02 | | Coulter Vbeta22 | |
| | TRBV2*03 | | | |
| TRBV3-1 | TRBV3-1*01 | FIN9 (TRBV3-1) | Serotec Vbeta9 | Mouse IgG2a |
| | | ZOE | Coulter Vbeta9 | |
| | TRBV3-1*02 | AMKB1-2 (TRBV3-1) | BD Biosciences Vbeta9 | Mouse IgG1 |
| TRBV4-1 | TRBV4-1*01 | ZOE (TRBV4-1, TRBV4-2, | Serotec V BETA 7 | Mouse IgG2a |
| | | TRBV4-3) | Coulter Vbeta7 | |
| | TRBV4-1*02 | 3G5 (TRBV4-1) | Pierce Endogen V beta 7.1 | Mouse IgG2b |
| TRBV4-2 | TRBV4-2*01 | ZOE (TRBV4-1, TRBV4-2, | Serotec V BETA 7 | Mouse IgG2a |
| | TRBV4-2*02 | TRBV4-3) | Coulter Vbeta7 | |
| TRBV4-3 | TRBV4-3*01 | ZOE (TRBV4-1, TRBV4-2, | Serotec V BETA 7 | Mouse IgG2a |
| | TRBV4-3*02 | TRBV4-3) | Coulter Vbeta7 | |
| | TRBV4-3*03 | | | |
| | TRBV4-3*04 | ZIZOU4 (TRBV4-3) | Coulter Vbeta7.2 | Mouse IgG2a |
| TRBV5-1 | TRBV5-1*01 | IMMU157 (TRBV5-1) | Serotec Vbeta5.1 | Mouse IgG2a |
| | | | Coulter Vbeta5.1 | |
| | TRBV5-1*02 | LC4 (TRBV5-1) | Pierce Endogen V beta 5(c) | Mouse IgG1 |
| | | | BD Biosciences VbetaS(c) | |
| TRBV5-4 | TRBV5-4*01 | | | |
| | TRBV5-4*02 | | | |
| | TRBV5-4*03 | | | |
| | TRBV5-4*04 | | | |
| TRBV5-5 | TRBV5-5*01 | 3D11 (TRBV5-5) | Serotec VBETA5.3 | Mouse IgG1 |
| | | | Coulter Vbeta5.3 | |
| | TRBV5-5*02 | 1C1 (TRBV5-5, TRBV5-6) | Pierce Endogen V beta 5(a) | Mouse IgG1 |
| | | | BD Biosciences Vbeta5(a) | |
| | TRBV5-5*03 | W112 (TRBV5-5) | Pierce Endogen V beta 5(b) | Mouse IgG1 |
| | | MH3-2 (TRBV5-5, | Serotec V beta 5.2/5.3 | |
| | | | BD Biosciences Vbeta5(b) | |
| | | TRBV5-6) | BD Biosciences VbetaS | Mouse IgG2a |
| | | 4H11 (TM27) as disclosed | | |
| | | in U.S. Patent 5,861,155 | | |
| TRBV5-6 | TRBV5-6*01 | 36213 (TRBV5-6) | Serotec Vbeta5.2 | Mouse IgG1 |
| | | 1C1 (TRBV5-5, TRBV5-6) | BD Biosciences Vbeta5(a) | Mouse IgG1 |
| | | MH3-2 (TRBV5-S, | BD Biosciences Vbeta | Mouse IgG2a |
| | | TRBV5-6) | | |
| TRBV5-8 | TRBV5-8*01 | | | |
| | TRBV5-8*02 | | | |
| TRBV6-1 | TRBV6-1*01 | BAM13 (TRBV6-1, | Pierce Endogen V beta 13 | Mouse IgG1 |
| | | TRBV6-5) | BD Biosciences Vbeta13.1, | |
| | | | 13.3 | |
| TRBV6-2 | TRBV6-2*01 | H132 | Coulter Vbeta13.2 | Mouse IgG1 |
| TRBV6-3 | TRBV6-3*01 | | | |
| TRBV6-4 | TRBV6-4*01 | | | |
| | TRBV6-4*02 | | | |
| TRBV6-5 | TRBV6-5*01 | IMMU 222 (TRBV6-5, | Serotec V BETA 13.1 | Mouse IgG2b |
| | | TRBV6-6 and TRBV6-9) | Coulter Vbeta13.1 | |
| | | BAM13 (TRBV6-1, | Pierce Endogen V beta 13 | Mouse IgG1 |
| | | TRBV6-5) | BD Biosciences Vbeta13.1, | |
| | | | 13.3 | |
| TRBV6-6 | TRBV6-6*01 | JU-74 (TRBV6-6) | Serotec Vbeta13.6 | Mouse IgG1 |
| | TRBV6-6*02 | JU74.3 (TRBV6-6) | Coulter Vbeta13.6 | |
| | TRBV6-6*03 | IMMU 222 (TRBV6-5, | Serotec V BETA 13.1 | Mouse IgG2b |
| | TRBV6-6*04 | TRBV6-6 and TRBV6-9) | Coulter Vbeta13.1 | |
| | TRBV6-6*05 | | | |
| TRBV6-8 | TRBV6-8*01 | | | |
| TRBV6-9 | TRBV6-9*01 | IMMU 222 (TRBV6-5, | Serotec V BETA 13.1 | Mouse IgG2b |
| | | TRBV6-6 and TRBV6-9) | Coulter Vbeta13.1 | |
| TRBV7-2 | TRBV7-2*01 | OT145 (TRBV7-2) | Pierce Endogen V beta 6.7 | Mouse IgG1 |
| | TRBV7-2*02 | | BD Biosciences Vbeta6.7 | |
| | TRBV7-2*03 | | | |
| | TRBV7-2*04 | | | |
| TRBV7-3 | TRBV7-3*01 | | | |
| | TRBV7-3*04 | | | |
| | TRBV7-3*05 | | | |
| TRBV7-4 | TRBV7-4*01 | | | |
| TRBV7-6 | TRBV7-6*01 | | | |
| | TRBV7-6*02 | | | |
| TRBV7-7 | TRBV7-7*01 | | | |
| | TRBV7-7*02 | | | |
| TRBV7-8 | TRBV7-8*01 | | | |
| | TRBV7-8*02 | | | |
| | TRBV7-8*03 | | | |
| TRBV7-9 | TRBV7-9*01 | | | |
| | TRBV7-9*02 | | | |
| | TRBV7-9*03 | | | |
| | TRVB7-9*04 | | | |
| | TRBV7-9*05 | | | |
| | TRBV7-9*06 | | | |
| | TRBV7-9*07 | | | |
| TRBV9 | TRBV9*01 | BL37.2 (TRBV9) | Serotec Vbetal | Rat IgG1 |
| | TRBV9*02 | | Coulter Vbetal | |
| | TRBV9*03 | | | |
| TRBV10-1 | TRBV10-1*01 | S511 (TRBV10-1, | Pierce Endogen V beta 12 | Mouse IgG2b |
| | TRBV10-1*02 | TRBV10-2, TRBV10-3) | BD Biosciences Vbeta12 | |
| TRBV10-2 | TRBV10-2*01 | | | |
| | TRBV10-2*02 | | | |
| TRBV10-3 | TRBV10-3*01 | VER2.32.1 (TRBV10-3) | Serotec Vbeta12 | Mouse IgG2a |
| | TRBV10-3*02 | S511 (TRBV10-1, | Coulter Vbeta12 | |
| | TRBV10-3*03 | TRBV10-2, TRBV10-3) | Pierce Endogen V beta 12 | Mouse IgG2b |
| | TRBV10-3*04 | | BD Biosciences Vbeta12 | |
| TRBV11-1 | TRBV11-1*01 | | | |
| TRBV11-2 | TRBV11-2*01 | IG125 (TRBV11-2) | Serotec Vbeta21.3 | Mouse IgG2a |
| | TRBV11-2*02 | | Coulter Vbeta21.3 | |
| | TRBV11-2*03 | | | |
| TRBV11-3 | TRBV11-3*01 | | | |
| | TRBV11-3*02 | | | |
| | TRBV11-3*03 | | | |
| | TRBV11-3*04 | | | |
| TRBV12-3 | TRBV12-3*01 | 56C5 (TRBV12-3, | Serotec Vbeta8.1/8.2 | Mouse IgG2a |
| | | TRBV12-4) | Coulter Vbeta8 | |
| TRBV12-4 | TRBV12-4*01 | 56C5.2 (TRBV12-3, | Pierce Endogen V beta 8(a) | Mouse IgG2b |
| | TRBV12-4*02 | TRBV12-4) | BD Biosciences Vbeta8 | |
| | | 16G8 (TRBV12-3, | Pierce Endogen V beta 8(b) | Mouse IgG2a |
| | | TRBV12-4) | BD Biosciences | Mouse IgG2b |
| | | MX-6 (TRBV12-3, | Vbeta8 | |
| | | TRBV12-4) | | |
| | | JR2 (TRBV12-3, TRBV12- | | |
| | | 4, TRBV12-5) | | |
| TRBV12-5 | TRBV12-5*01 | JR2(TRBV12-3, TRBV12- | BD Biosciences Vbeta8 | Mouse IgG2b |
| | | 4, TRBV12-5) | | |
| TRBV13 | TRBV13*01 | AF-23 (TRBV13) | Serotec Vbeta23 | Mouse IgG1 |
| | TRBV13*02 | AF23 (TRBV13) | Coulter Vbeta23 | |
| | | AHUT7 (Vbeta23) | BD Biosciences Vbeta23 | |
| TRBV14 | TRBV14*01 | TAMAYA1.2 (TRBV14) | Serotec Vbeta16 | Mouse IgG1 |
| | TRBV14*02 | | Coulter Vbeta16 | |
| TRBV15 | TRBV15*01 | | | |
| | TRBV15*02 | | | |
| | TRBV15*03 | | | |
| TRBV16 | TRBV16*01 | | | |
| | TRBV16*03 | | | |
| TRBV18 | TRBV18*01 | BA62 (TRBV18) | Serotec V BETA 18 | Mouse IgG1 |
| | | BA62.6 (TRBV18) | Coulter Vbeta18 | |
| TRBV 19 | TRBV19*01 | C1 (TRBV19) | Pierce Endogen V beta 17 | Mouse IgG1 |
| | | E17.5F3 (TRBV19) | BD Biosciences Vbeta 17 | |
| | TRBV19*02 | E17.5F3.15.13 (TRBV19) | Serotec Vbetal7 | Mouse IgG1 |
| | TRBV19*03 | | Coulter Vbeta17 | |
| TRBV20-1 | TRBV20-1*01 | MPB2DS (TRBV20-1) | Serotec VBETA2 | Mouse IgG1 |
| | TRBV20-1*02 | | Coulter Vbeta2 | |
| | TRBV20-1*03 | | | |
| | TRBV20-1*04 | | | |
| | TRBV20-1*05 | | | |
| | TRBV20-1*06 | | | |
| | TRBV20-1*07 | | | |
| TRBV24-1 | TRBV24-1*01 | | | |
| TRBV25-1 | TRBV25-1*01 | C21 (TRBV25-1) | Serotec V BETA 11 | Mouse IgG2a |
| | | | Coulter Vbetall | |
| TRBV27 | TRBV27*01 | CAS1.1.3 (TRBV27) | Serotec Vbeta14 | Mouse IgG1 |
| | | | Coulter Vbeta14 | |
| TRBV28 | TRBV28*01 | CH92 (TRBV28) | Serotec Vbeta3 | Mouse IgM |
| | | | Coulter Vbeta3 | |
| | | 8F10 (TRBV28) | Pierce Endogen V beta 3.1 | Mouse IgG1 |
| | | JOVI-3 (TRBV28) | BD Biosciences Vbeta3 | Mouse IgG2a |
| TRBV29-1 | TRBV29-1*01 | WJF24 | Coulter Vbeta4 | Rat IgM |
| | TRBV29-1*02 | | | |
| | TRBV29-1*03 | | | |
| TRBV30 | TRBV30*01 | ELL1.4 (TRBV30) | Serotec Vbeta20 | Mouse IgG1 |
| | TRBV30*02 | | Coulter Vbeta20 | |
| | TRBV30*04 | | | |
| | TRBV30*05 | | | |

TABLE 10B
Amino acid sequences for anti TCRβ V5 antibodies. Amino acid and nucleotide sequences for
murine and humanized antibody molecules which bind to TCRVB 5 (e.g., TCRVB 5-5 or TCRVB 5-6).
The amino acid the heavy and light chain CDRs, and the amino acid and nucleotide sequences
of the heavy and light chain variable regions, and the heavy and light chains are shown.
Marine antibody C, also referred to as 4H11

| | | |
|---|---|---|
| SEQ ID NO: 1315 | HC CDR1 (Kabat) | AYGVN |
| SEQ ID NO: 1316 | HC CDR2 (Kabat) | MIWGDGNTDYNSALKS |
| SEQ ID NO: 1317 | HC CDR3 (Kabat) | DRVTATLYAMDY |
| SEQ ID NO: 1318 | HC CDR1 (Chothia) | GFSLTAY |
| SEQ ID NO: 1319 | HC CDR2 (Chothia) | WGDGN |
| SEQ ID NO: 1317 | HC CDR3 (Chothia) | DRVTATLYAMDY |
| SEQ ID NO: 1320 | HC CDR1 (Combined) | GFSLTAYGVN |
| SEQ ID NO: 1316 | HC CDR2 (Combined) | MIWGDGNTDYNSALKS |
| SEQ ID NO: 1317 | HC CDR3 (Combined) | DRVTATLYAMDY |
| SEQ ID NO: 1321 | LC CDR1 (Kabat) | SASQGISNYLN |
| SEQ ID NO: 1322 | LC CDR2 (Kabat) | YTSSLHS |
| SEQ ID NO: 1323 | LC CDR3 (Kabat) | QQYSKLPRT |
| SEQ ID NO: 1321 | LC CDR1 (Chothia) | SASQGISNYLN |
| SEQ ID NO: 1322 | LC CDR2 (Chothia) | YTSSLHS |
| SEQ ID NO: 1323 | LC CDR3 (Chothia) | QQYSKLPRT |
| SEQ ID NO: 1321 | LC CDR1 (Combined) | SASQGISNYLN |
| SEQ ID NO: 1322 | LC CDR2 (Combined) | YTSSLHS |
| SEQ ID NO: 1323 | LC CDR3 (Combined) | QQYSKLPRT |
| SEQ ID NO: 232 | VH | DIQMTQTTSSLSASLGDRVTISCSASQGISNYLNWYQQK |
| | | PDGTVKLLIYYTSSLHSGVPSRFSGSGSGTDYSLTISNLE |
| | | PEDIATYYCQQYSKLPRTFGGGTKVEIK |
| SEQ ID NO: 233 | VL | QVQLKESGPGLVAPSQSLSITCTVSGFSLTAYGVNWVR |
| | | QPPGKGLEWLGMIWGDGNTDYNSALKSRLSISKDNSKS |
| | | QVFLKMNSLQTDDTARYYCARDRVTATLYAMDYWGQ |
| | | GTSVTVSS |

Humanized antibody C
C-H-1 antibody

| | | |
|---|---|---|
| SEQ ID NO: 1315 | HC CDR1 (Kabat) | AYGVN |
| SEQ ID NO: 1316 | HC CDR2 (Kabat) | MIWGDGNTDYNSALKS |
| SEQ ID NO: 1317 | HC CDR3 (Kabat) | DRVTATLYAMDY |
| SEQ ID NO: 1318 | HC CDR1 (Chothia) | GFSLTAY |
| SEQ ID NO: 1319 | HC CDR2 (Chothia) | WGDGN |
| SEQ ID NO: 1317 | HC CDR3 (Chothia) | DRVTATLYAMDY |
| SEQ ID NO: 1320 | HC CDR1 (Combined) | GFSLTAYGVN |
| SEQ ID NO: 1316 | HC CDR2 (Combined) | MIWGDGNTDYNSALKS |
| SEQ ID NO: 1317 | HC CDR3 (Combined) | DRVTATLYAMDY |
| SEQ ID NO: 1321 | LC CDR1 (Kabat) | SASQGISNYLN |
| SEQ ID NO: 1322 | LC CDR2 (Kabat) | YTSSLHS |
| SEQ ID NO: 1323 | LC CDR3 (Kabat) | QQYSKLPRT |
| SEQ ID NO: 1321 | LC CDR1 (Chothia) | SASQGISNYLN |
| SEQ ID NO: 1322 | LC CDR2 (Chothia) | YTSSLHS |
| SEQ ID NO: 1323 | LC CDR3 (Chothia) | QQYSKLPRT |
| SEQ ID NO: 1321 | LC CDR1 (Combined) | SASQGISNYLN |
| SEQ ID NO: 1322 | LC CDR2 (Combined) | YTSSLHS |
| SEQ ID NO: 1323 | LC CDR3 (Combined) | QQYSKLPRT |
| SEQ ID NO: 1324 | VL | DIQMTQSPSSLSASVGDRVTITCSASQGISNYLNWYQQTP |
| | | GKAPKLLIYYTSSLHSGVPSRFSGSGSGTDYTFTISSLQPE |
| | | DIATYYCQQYSKLPRTFGQGTKLQIT |
| SEQ ID NO: 1325 | VH | QVQLQESGPGLVRPSQTLSLTCTVSGFSLTAYGVNWVR |
| | | QPPGRGLEWLGMIWGDGNTDYNSALKSRVTMLKDTSK |
| | | NQFSLRLSSVTAADTAVYYCARDRVTATLYAMDYW |
| | | GQGSLVTVSS |

Humanized antibody C Variable light chain (VL)

| | | | |
|---|---|---|---|
| SEQ ID NO: 3000 | VL | C-H-VL.1 | DIQMTQSPSFLSASVGDRVTITCSASQGISNYLNWYQQK |
| | | | PGKAVKLLIYYTSSLHSGVPSRFSGSGSGTEYTLTISSLQ |
| | | | PEDFATYYCQQYSKLPRTFGGGTKVEIK |
| SEQ ID NO: 3001 | VL | C-H-VL.2 | DIQMTQSPSSLSASVGDRVTITCSASQGISNYLNWYQQK |
| | | | PGKAVKLLIYYTSSLHSGVPSRFSGSGSGTDYTLTISSLQ |
| | | | PEDFATYYCQQYSKLPRTFGGGTKVEIK |
| SEQ ID NO: 3002 | VL | C-H-VL.3 | DIQMTQSPSSLSASVGDRVTITCSASQGISNYLNWYQQK |
| | | | PGKVVKLLIYYTSSLHSGVPSRFSGSGSGTDYTLTISSLQ |
| | | | PEDVATYYCQQYSKLPRTFGGGTKVEIK |
| SEQ ID NO: 3003 | VL | C-H-VL.4 | DIQMTQSPSSLSASVGDRVTITCSASQGISNYLNWYQQK |
| | | | PGQAVKLLIYYTSSLHSGVPSRFSGSGSGTDYTLTISSLQ |
| | | | PEDVATYYCQQYSKLPRTFGGGTKVEIK |
| SEQ ID NO: 3004 | VL | C-H-VL.5 | DIQMTQSPSSLSASVGDRVTITCSASQGISNYLNWYQQK |
| | | | PGKAVKLLIYYTSSLHSGVPSRFSGSGSGTDYTFTISSLQ |
| | | | PEDIATYYCQQYSKLPRTFGGGTKVEIK |
| SEQ ID NO: 3005 | VL | C-H-VL.6 | DIQMTQSPSSLSASVGDRVTITCSASQGISNYLNWYQQK |
| | | | PGKTVKLLIYYTSSLHSGIPSRFSGSGSGTDYTLTIRSLQP |
| | | | EDFATYYCQQYSKLPRTFGGGTKVEIK |
| SEQ ID NO: 3006 | VL | C-H-VL.7 | AIQMTQSPSSLSASVGDRVTITCSASQGISNYLNWYQQK |
| | | | PGKAVKLLIYYTSSLHSGVPSRFSGSGSGTDYTLTISSLQ |
| | | | PEDFATYYCQQYSKLPRTFGGGTKVEIK |
| SEQ ID NO: 3007 | VL | C-H-VL.8 | DIQMTQSPSSVSASVGDRVTITCSASQGISNYLNWYQQK |
| | | | PGKAVKLLIYYTSSLHSGVPSRFSGSGSGTDYTLTISSLQ |
| | | | PEDFATYYCQQYSKLPRTFGGGTKVEIK |
| SEQ ID NO: 3008 | VL | C-H-VL.9 | DIQMTQSPSSLSASVGDRVTITCSASQGISNYLNWYQQK |
| | | | PGKAVKRLIYYTSSLHSGVPSRFSGSGSGTEYTLTISNLQ |
| | | | PEDFATYYCQQYSKLPRTFGGGTKVEIK |
| SEQ ID NO: 3009 | VL | C-H-VL.10 | AIRMTQSPFSLSASVGDRVTITCSASQGISNYLNWYQQK |
| | | | PAKAVKLFIYYTSSLHSGVPSRFSGSGSGTDYTLTISSLQ |
| | | | PEDFATYYCQQYSKLPRTFGGGTKVEIK |
| SEQ ID NO: 3010 | VL | C-H-VL.11 | DIQMTQSPSSLSASVGDRVTITCSASQGISNYLNWYQQK |
| | | | PGKAVKRLIYYTSSLHSGVPSRFSGSGSGTEYTLTISSLQ |
| | | | PEDFATYYCQQYSKLPRTFGGGTKVEIK |
| SEQ ID NO: 3011 | VL | C-H-VL.12 | DIQMTQSPSTLSASVGDRVTITCSASQGISNYLNWYQQK |
| | | | PGKAVKLLIYYTSSLHSGVPSRFSGSGSGTEYTLTISSLQ |
| | | | PDDFATYYCQQYSKLPRTFGGGTKVEIK |
| SEQ ID NO:3012 | VL | C-H-VL.13 | DIQMTQSPSSLSASVGDRVTITCSASQGISNYLNWYQQK |
| | | | PGKAVKSLIYYTSSLHSGVPSRFSGSGSGTDYTLTISSLQ |
| | | | PEDFATYYCQQYSKLPRTFGGGTKVEIK |
| SEQ ID NO: 3013 | VL | C-H-VL.14 | DIQMTQSPSSLSASVGDRVTITCSASQGISNYLNWYQQK |
| | | | PGKAVKSLIYYTSSLHSGVPSKFSGSGSGTDYTLTISSLQ |
| | | | PEDFATYYCQQYSKLPRTFGGGTKVEIK |
| SEQ ID NO: 3014 | VL | C-H-VL.15 | DIQMTQSPSSLSASVGDRVTITCSASQGISNYLNWYQQK |
| | | | PEKAVKSLIYYTSSLHSGVPSRFSGSGSGTDYTLTISSLQ |
| | | | PEDFATYYCQQYSKLPRTFGGGTKVEIK |
| SEQ ID NO: 3015 | VL | C-H-VL.16 | DIQMTQSPSAMSASVGDRVTITCSASQGISNYLNWYQQ |
| | | | KPGKVVKRLIYYTSSLHSGVPSRFSGSGSGTEYTLTISSL |
| | | | QPEDFATYYCQQYSKLPRTFGGGTKVEIK |
| SEQ ID NO: 3016 | VL | C-H-VL.17 | DIVMTQSPDSLAVSLGERATINCSASQGISNYLNWYQQ |
| | | | KPGQPVKLLIYYTSSLHSGVPDRFSGSGSGTDYTLTISSL |
| | | | QAEDVAVYYCQQYSKLPRTFGGGTKVEIK |
| SEQ ID NO: 3017 | VL | C-H-VL.18 | EIVMTQSPGTLSLSPGERATLSCSASQGISNYLNWYQQK |
| | | | PGQAVKLLIYYTSSLHSGIPDRFSGSGSGTDYTLTISRLEP |
| | | | EDFAVYYCQQYSKLPRTFGGGTKVEIK |
| SEQ ID NO: 3018 | VL | C-H-VL.19 | EIVMTQSPPTLSLSPGERVTLSCSASQGISNYLNWYQQK |
| | | | PGQAVKLLIYYTSSLHSGIPARFSGSGSGTDYTLTISSLQP |
| | | | EDFAVYYCQQYSKLPRTFGGGTKVEIK |
| SEQ ID NO: 3019 | VL | C-H-VL.20 | EIVMTQSPPTLSLSPGERVTLSCSASQGISNYLNWYQQK |
| | | | PGQAVKLLIYYTSSLHSSIPARFSGSGSGTDYTLTISSLQP |
| | | | EDFAVYYCQQYSKLPRTFGGGTKVEIK |
| SEQ ID NO: 3020 | VL | C-H-VL.21 | EIVMTQSPATLSLSPGERATLSCSASQGISNYLNWYQQK |
| | | | PGQAVELLIYYTSSLHSGIPARFSGSGSGTDYTLTISSLEP |
| | | | EDFAVYYCQQYSKLPRTFGGGTKVEIK |
| SEQ ID NO: 3021 | VL | C-H-VL.22 | EIVMTQSPATLSLSPGERATLSCSASQGISNYLNWYQQK |
| | | | PGQAVKLLIYYTSSLHSGIPARFSGSGSGTDYTLTISRLEP |
| | | | EDFAVYYCQQYSKLPRTFGGGTKVEIK |
| SEQ ID NO: 3022 | VL | C-H-VL.23 | EIVMTQSPATLSLSPGERATLSCSASQGISNYLNWYQQK |
| | | | PGQAVKLLIYYTSSLHSGIPDRFSGSGSGTDYTLTISRLEP |
| | | | EDFAVYYCQQYSKLPRTFGGGTKVEIK |
| SEQ ID NO: 3023 | VL | C-H-VL.24 | EIVMTQSPATLSLSPGERATLSCSASQGISNYLNWYQQK |
| | | | PGLAVKLLIYYTSSLHSGIPDRFSGSGSGTDYTLTISRLEP |
| | | | EDFAVYYCQQYSKLPRTFGGGTKVEIK |
| SEQ ID NO: 3024 | VL | C-H-VL.25 | DIQMIQSPSFLSASVGDRVSIICSASQGISNYLNWYLQKP |
| | | | GKSVKLFIYYTSSLHSGVSSRFSGRGSGTDYTLTIISLKPE |
| | | | DFAAYYCQQYSKLPRTFGGGTKVEIK |
| SEQ ID NO: 3025 | VL | C-H-VL.26 | EIVMTQSPATLSLSPGERATLSCSASQGISNYLNWYQQK |
| | | | PGQAVKLLIYYTSSLHSGIPARFSGSGSGTDYTLTISSLQP |
| | | | EDFAVYYCQQYSKLPRTFGGGTKVEIK |
| SEQ ID NO: 3026 | VL | C-H-VL.27 | EIVMTQSPATLSLSPGERATLSCSASQGISNYLNWYQQK |
| | | | PGQAVKLLIYYTSSLHSGIPARFSGSGPGTDYTLTISSLEP |
| | | | EDFAVYYCQQYSKLPRTFGGGTKVEIK |
| SEQ ID NO: 3027 | VL | C-H-VL.28 | DIVMTQTPLSLSVTPGQPASISCSASQGISNYLNWYLQK |
| | | | PGQSVKLLIYYTSSLHSGVPDRFSGSGSGTDYTLKISRVE |
| | | | AEDVGVYYCQQYSKLPRTFGGGTKVEIK |
| SEQ ID NO: 3028 | VL | C-H-VL.29 | DIVMTQTPLSLSVTPGQPASISCSASQGISNYLNWYLQK |
| | | | PGQPVKLLIYYTSSLHSGVPDRFSGSGSGTDYTLKISRVE |
| | | | AEDVGVYYCQQYSKLPRTFGGGTKVEIK |
| SEQ ID NO: 3029 | VL | C-H-VL.30 | DIVMTQSPAFLSVTPGEKVTITCSASQGISNYLNWYQQK |
| | | | PDQAVKLLIYYTSSLHSGVPSRFSGSGSGTDYTFTISSLE |
| | | | AEDAATYYCQQYSKLPRTFGGGTKVEIK |
| SEQ ID NO: 3030 | VL | C-H-VL.31 | DIVMTQSPLSLPVTPGEPASISCSASQGISNYLNWYLQKP |
| | | | GQSVKLLIYYTSSLHSGVPDRFSGSGSGTDYTLKISRVE |
| | | | AEDVGVYYCQQYSKLPRTFGGGTKVEIK |
| SEQ ID NO: 3031 | VL | C-H-VL.32 | DIVMTQTPLSLPVTPGEPASISCSASQGISNYLNWYLQKP |
| | | | GQSVKLLIYYTSSLHSGVPDRFSGSGSGTDYTLKISRVE |
| | | | AEDVGVYYCQQYSKLPRTFGGGTKVEIK |
| SEQ ID NO: 3032 | VL | C-H-VL.33 | EIVMTQSPATLSVSPGERATLSCSASQGISNYLNWYQQK |
| | | | PGQAVKLLIYYTSSLHSGIPARFSGSGSGTEYTLTISILQS |
| | | | EDFAVYYCQQYSKLPRTFGGGTKVEIK |
| SEQ ID NO: 3033 | VL | C-H-VL.34 | EIVMTQSPATLSVSPGERATLSCSASQGISNYLNWYQQK |
| | | | PGQAVELLIYYTSSLHSGIPARFSGSGSGTEYTLTISSLQS |
| | | | EDFAVYYCQQYSKLPRTFGGGTKVEIK |
| SEQ ID NO: 3034 | VL | C-H-VL.35 | DIVMTQSPLSLPVTLGQPASISCSASQGISNYLNWYQQR |
| | | | PGQSVKRLIYYTSSLHSGVPDRFSGSGSGTDYTLKISRVE |
| | | | AEDVGVYYCQQYSKLPRTFGGGTKVEIK |
| SEQ ID NO: 3035 | VL | C-H-VL.36 | EITMTQSPAFMSATPGDKVNISCSASQGISNYLNWYQQ |
| | | | KPGEAVKFIIYYTSSLHSGIPPRFSGSGYGTDYTLTINNIE |
| | | | SEDAAYYYCQQYSKLPRTFGGGTKVEIK |
| SEQ ID NO: 3036 | VL | C-H-VL.37 | DIVMTQTPLSSPVTLGQPASISCSASQGISNYLNWYQQR |
| | | | PGQPVKLLIYYTSSLHSGVPDRFSGSGAGTDYTLKISRV |
| | | | EAEDVGVYYCQQYSKLPRTFGGGTKVEIK |
| SEQ ID NO: 3037 | VL | C-H-VL.38 | EIVMTQSPDFQSVTPKEKVTITCSASQGISNYLNWYQQK |
| | | | PDQSVKLLIYYTSSLHSGVPSRFSGSGSGTDYTLTINSLE |
| | | | AEDAATYYCQQYSKLPRTFGGGTKVEIK |
| SEQ ID NO: 3038 | VL | C-H-VL.39 | EIVMTQTPLSLSITPGEQASISCSASQGISNYLNWYLQKA |
| | | | RPVVKLLIYYTSSLHSGVPDRFSGSGSGTDYTLKISRVEA |
| | | | EDFGVYYCQQYSKLPRTFGGGTKVEIK |
| SEQ ID NO: 3039 | VL | C-H-VL.40 | EIVMTQTPLSLSITPGEQASMSCSASQGISNYLNWYLQK |
| | | | ARPVVKLLIYYTSSLHSGVPDRESGSGSGTDYTLKISRVE |
| | | | AEDFGVYYCQQYSKLPRTFGGGTKVEIK |

Humanized antibody C Variable HEAVY chain (VH)

| | | | |
|---|---|---|---|
| SEQ ID NO: 3040 | VH | C-H-VH.1 | QVTLKESGPVLVKPTETLTLTCTVSGFSLTAYGVNWVR |
| | | | QPPGKALEWLGMIWGDGNTDYNSALKSRLTISKDNSKS |
| | | | QVVLTMTNMDPVDTATYYCARDRVTATLYAMDYWG |
| | | | QGTLVTVSS |
| SEQ ID NO: 3041 | VH | C-H-VH.2 | QVTLKESGPALVKPTETLTLTCTVSGFSLTAYGVNWVR |
| | | | QPPGKALEWLGMIWGDGNTDYNSALKSRLIISKDNSKS |
| | | | QVVLTMTNMDPVDTATYYCARDRVTATLYAMDYWG |
| | | | QGTLVTVSS |
| SEQ ID NO: 3042 | VH | C-H-VH.3 | QVTLKESGPALVKPTQTLTLTCTVSGFSLTAYGVNWVR |
| | | | QPPGKALEWLGMIWGDGNTDYNSALKSRLTISKDNSKS |
| | | | QVVLTMTNMDPVDTATYYCARDRVTATLYAMDYWG |
| | | | QGTLVTVSS |
| SEQ ID NO: 3043 | VH | C-H-VH.4 | QVQLQESGPGLVKPSGTLSLTCAVSGFSLTAYGVNWVR |
| | | | QPPGKGLEWLGMIWGDGNTDYNSALKSRLTISKDNSKS |
| | | | QVSLKLSSVTAADTAVYYCARDRVTATLYAMDYWGQ |
| | | | GTLVTVSS |
| SEQ ID NO: 3044 | VH | C-H-VH.5 | QVTLKESGPTLVKPTQTLTLTCTVSGFSLTAYGVNWVR |
| | | | QPPGKALEWLGMIWGDGNTDYNSALKSRLTITKDNSKS |
| | | | QVVLTMTNMDPVDTATYYCARDRVTATLYAMDYWG |
| | | | QGTLVTVSS |
| SEQ ID NO: 3045 | VH | C-H-VH.6 | QVTLKESGPALVKPTQTLTLTCTVSGFSLTAYGVNWVR |
| | | | QPPGKALEWLGMIWGDGNTDYNSALKSRLTITKDNSKS |
| | | | QVVLTMTNMDPVDTATYYCARDRVTATLYAMDYWG |
| | | | QGTLVTVSS |
| SEQ ID NO: 3046 | VH | C-H-VH.7 | QVQLQESGPGLVKPSQTLSLTCTVSGFSLTAYGVNWVR |
| | | | QPPGKGLEWLGMIWGDGNTDYNSALKSRLTISKDNSKS |
| | | | QVSLKLSSVTAADTAVYYCARDRVTATLYAMDYWGQ |
| | | | GTLVTVSS |
| SEQ ID NO: 3047 | VH | C-H-VH.8 | QVQLQESGPGLVKPSETLSLTCTVSGFSLTAYGVNWVR |
| | | | QPPGKGLEWLGMIWGDGNTDYNSALKSRLTISKDNSKS |
| | | | QVSLKLSSVTAADTAVYYCARDRVTATLYAMDYWGQ |
| | | | GTLVTVSS |
| SEQ ID NO: 3048 | VH | C-H-VH.9 | QVQLQESGPGLVKPSQTLSLTCAVSGFSLTAYGVNWVR |
| | | | QPPGKGLEWLGMIWGDGNTDYNSALKSRLTISKDNSKS |
| | | | QVSLKLSSVTAADTAVYYCARDRVTATLYAMDYWGQ |
| | | | GTLVTVSS |
| SEQ ID NO: 3049 | VH | C-H-VH.10 | QVQLQESGPGLVKPSDTLSLTCTVSGFSLTAYGVNWVR |
| | | | QPPGKGLEWLGMIWGDGNTDYNSALKSRLTISKDNSKS |
| | | | QVSLKLSSVTAADTAVYYCARDRVTATLYAMDYWGQ |
| | | | GTLVTVSS |
| SEQ ID NO: 3050 | VH | C-H-VH.11 | QVQLQESGPGLVKPSQTLSLTCTVSGFSLTAYGVNWVR |
| | | | QHPGKGLEWLGMIWGDGNTDYNSALKSRLTISKDNSKS |
| | | | QVSLKLSSVTAADTAVYYCARDRVTATLYAMDYWGQ |
| | | | GTLVTVSS |
| SEQ ID NO: 3051 | VH | C-H-VH.12 | QVQLQESGPGLVKPSQTLSLTCTVSGFSLTAYGVNWVR |
| | | | QPAGKGLEWLGMIWGDGNTDYNSALKSRLTISKDNSKS |
| | | | QVSLKLSSVTAADTAVYYCARDRVTATLYAMDYWGQ |
| | | | GTLVTVSS |
| SEQ ID NO: 3052 | VH | C-H-VH.13 | QVQLQESGPGLVKPSQTLSLTCAVSGFSLTAYGVNWVR |
| | | | QPPGKGLEWLGMIWGDGNTDYNSALKSRLTISKDNSKS |
| | | | QVSLKLSSVTAVDTAVYYCARDRVTATLYAMDYWGQ |
| | | | GTLVTVSS |
| SEQ ID NO: 3053 | VH | C-H-VH.14 | QVQLQESGPGLVKPSETLSLTCTVSGFSLTAYGVNWVR |
| | | | QPPGKGLEWLGMIWGDGNTDYNSALKSRLTISKDNSKS |
| | | | HVSLKLSSVTAADTAVYYCARDRVTATLYAMDYWGQ |
| | | | GTLVTVSS |
| SEQ ID NO: 3054 | VH | C-H-VH.15 | QVQLQESGPGLVKPSETLSLTCAVSGFSLTAYGVNWVR |
| | | | QPPGKGLEWLGMIWGDGNTDYNSALKSRLTISKDNSKS |
| | | | QVSLKLSSVTAADTAVYYCARDRVTATLYAMDYWGQ |
| | | | GTLVTVSS |
| SEQ ID NO: 3055 | VH | C-H-VH.16 | QVQLQESGPGLVKPSQTLSLTCAVYGFSLTAYGVNWVR |
| | | | QPPGKGLEWLGMIWGDGNTDYNSALKSRLTISKDNSKS |
| | | | QVSLKLSSVTAADTAVYYCARDRVTATLYAMDYWGQ |
| | | | GTLVTVSS |
| SEQ ID NO: 3056 | VH | C-H-VH.17 | RVQLQESGPGLVKPSETLSLTCTVSGFSLTAYGVNWVR |
| | | | QPPGKGLEWLGMIWGDGNTDYNSALKSRLTISKDNSKS |
| | | | QVPLKLSSVTAADTAVYYCARDRVTATLYAMDYWGQ |
| | | | GTLVTVSS |
| SEQ ID NO: 3057 | VH | C-H-VH.18 | QVQLQESGPGLVKPSQTLSLTCTVSGFSLTAYGVNWVR |
| | | | QHPGKGLEWLGMIWGDGNTDYNSALKSLLTISKDNSKS |
| | | | QVSLKLSSVTAADTAVYYCARDRVTATLYAMDYWGQ |
| | | | GTLVTVSS |
| SEQ ID NO: 3058 | VH | C-H-VH.19 | QVQLQESGPGLVKPSDTLSLTCAVSGFSLTAYGVNWVR |
| | | | QPPGKGLEWLGMIWGDGNTDYNSALKSRLTISKDNSKS |
| | | | QVSLKLSSVTALDTAVYYCARDRVTATLYAMDYWGQ |
| | | | GTLVTVSS |
| SEQ ID NO: 3059 | VH | C-H-VH.20 | QVQLQESGPGLVKPSDTLSLTCAVSGFSLTAYGVNWVR |
| | | | QPPGKGLEWLGMIWGDGNTDYNSALKSRLTISKDNSKS |
| | | | QVSLKLSSVTAVDTAVYYCARDRVTATLYAMDYWGQ |
| | | | GTLVTVSS |
| SEQ ID NO: 3060 | VH | C-H-VH.21 | QVQLQESGSGLVKPSQTLSLTCAVSGFSLTAYGVNWVR |
| | | | QPPGKGLEWLGMIWGDGNTDYNSALKSRLTISKDNSKS |
| | | | QVSLKLSSVTAADTAVYYCARDRVTATLYAMDYWGQ |
| | | | GTLVTVSS |
| SEQ ID NO: 3061 | VH | C-H-VH.22 | EVQLVESGGGLVQPGRSLRLSCTVSGFSLTAYGVNWVR |
| | | | QAPGKGLEWLGMIWGDGNTDYNSALKSRLTISKDNSKS |
| | | | IVYLQMNSLKTEDTAVYYCARDRVTATLYAMDYWGQ |
| | | | GTLVTVSS |
| SEQ ID NO: 3062 | VH | C-H-VH.23 | EVQLVESGGGLVQPGPSLRLSCTVSGFSLTAYGVNWVR |
| | | | QAPGKGLEWLGMIWGDGNTDYNSALKSRLTISKDNSKS |
| | | | IVYLQMNSLKTEDTAVYYCARDRVTATLYAMDYWGQ |
| | | | GTLVTVSS |
| SEQ ID NO: 3063 | VH | C-H-VH.24 | QVQLQESGSGLVKPSQTLSLTCAVSGFSLTAYGVNWVR |
| | | | QSPGKGLEWLGMIWGDGNTDYNSALKSRLTISKDNSKS |
| | | | QVSLKLSSVTAADTAVYYCARDRVTATLYAMDYWGQ |
| | | | GTLVTVSS |
| SEQ ID NO: 3064 | VH | C-H-VH.25 | QVQLQESGPGLVKPSETLSLTCTVSGFSLTAYGVNWVR |
| | | | QPAGKGLEWLGMIWGDGNTDYNSALKSRLTISKDNSKS |
| | | | QVSLKLSSVTAADTAVYYCARDRVTATLYAMDYWGQ |
| | | | GTLVTVSS |
| SEQ ID NO: 3065 | VH | C-H-VH.26 | EVQLVESGGGLVKPGRSLRLSCTVSGFSLTAYGVNWVR |
| | | | QAPGKGLEWLGMIWGDGNTDYNSALKSRLTISKDNSKS |
| | | | IVYLQMNSLKTEDTAVYYCARDRVTATLYAMDYWGQ |
| | | | GTLVTVSS |
| SEQ ID NO: 3066 | VH | C-H-VH.27 | QVQLQESGPGLVKPSETLSLTCAVYGFSLTAYGVNWVR |
| | | | QPPGKGLEWLGMIWGDGNTDYNSALKSRLTISKDNSKS |
| | | | QVYLKLSSVTAADTAVYYCARDRVTATLYAMDYWGQ |
| | | | GTLVTVSS |
| SEQ ID NO: 3067 | VH | C-H-VH.28 | QVQLQESGPGLVKPSDTLSLTCAVSGFSLTAYGVNWVR |
| | | | QPPGKGLEWLGMIWGDGNTDYNSALKSRLTISKDNSKS |
| | | | QVSLKLSSVTAVDTGVYYCARDRVTATLYAMDYWGQ |
| | | | GTLVTVSS |
| SEQ ID NO: 3068 | VH | C-H-VH.29 | EVQLVESGGGLVQPGGSLRLSCAVSGFSLTAYGVNWV |
| | | | RQAPGKGLEWLGMIWGDQNTDYNSALKSRLTISKDNS |
| | | | KSSVYLQMNSLKTEDTAVYYCARDRVTATLYAMDYW |
| | | | GQGTLVTVSS |
| SEQ ID NO: 3069 | VH | C-H-VH.30 | EVQLVESGGGLVKPGGSLRLSCAVSGFSLTAYGVNWV |
| | | | RQAPGKGLEWLGMIWGDGNTDYNSALKSRLTISKDNS |
| | | | KSTVYLQMNSLKTEDTAVYYCARDRVTATLYAMDYW |
| | | | GQGTLVTVSS |
| SEQ ID NO: 3070 | VH | C-H-VH.31 | QVQLQQSGPGLVKPSQTLSLTCAVSGFSLTAYGVNWVR |
| | | | QSPSRGLEWLGMIWGDGNTDYNSALKSRLTINKDNSKS |
| | | | QVSLQLNSVTPEDTAVYYCARDRVTATLYAMDYWGQ |
| | | | GTLVTVSS |
| SEQ ID NO: 3071 | VH | C-H-VH.32 | QVQLVESGGGLVQPGGSLRLSCSVSGFSLTAYGVNWVR |
| | | | QAPGKGLEWLGMIWGDGNTDYNSALKSRLTISKDNSKS |
| | | | TVYLQMNSLRAEDTAVYYCARDRVTATLYAMDYWGQ |
| | | | GTLVTVSS |
| SEQ ID NO: 3072 | VH | C-H-VH.33 | QVQLQQWGAGLLKPSETLSLTCAVYGFSLTAYGVNWV |
| | | | RQPPGKGLEWLGMIWGDGNTDYNSALKSRLTISKDNSK |
| | | | SQVSLKLSSVTAADTAVYYCARDRVTATLYAMDYWG |
| | | | QGTLVTVSS |
| SEQ ID NO: 3073 | VH | C-H-VH.34 | QVQLVESGGGVVQPGRSLRLSCAVSGFSLTAYGVNWV |
| | | | RQAPGKGLEWLGMIWGDGNTDYNSALKSRLTISKDNST |
| | | | STVFLQMNSLRAEDTAVYYCARDRVTATLYAMDYWG |
| | | | QGTLVTVSS |
| SEQ ID NO: 3074 | VH | C-H-VH.35 | EVQLVESGGGLVQPGGSLRLSCAVSGFSLTAYGVNWV |
| | | | RQAPGKGLEWLGMIWGDGNTDYNSALKSRLTISKDNS |
| | | | KSTVYLQMNSLRAEDTAVYYCARDRVTATLYAMDYW |
| | | | GQGTLVTVSS |
| SEQ ID NO: 3075 | VH | C-H-VH.36 | EVQLVESGGGLVQPGGSLRLSCAVSQFSLTAYGVNWV |
| | | | RQAPGKGLEWLGMIWQDGNTDYNSALKSRLTISKDNA |
| | | | KSSVYLQMNSLRDEDTAVYYCARDRVTATLYAMDYW |
| | | | GQGTLVTVSS |
| SEQ ID NO: 3076 | VH | C-H-VH.37 | EVQLLESGGGLVQPGGSLRLSCAVSGFSLTAYGVNWVR |
| | | | QAPGKGLEWLGMIWGDGNTDYNSALKSRLTISKDNSKS |
| | | | TVYLQMNSLRAEDTAVYYCARDRVTATLYAMDYWGQ |
| | | | GTLVTVSS |
| SEQ ID NO: 3077 | VH | C-H-VH.38 | QVQLVESGGGLVKPGGSLRLSCAVSGFSLTAYGVNWV |
| | | | RQAPGKGLEWLGMIWGDQNTDYNSALKSRLTISKDNA |
| | | | KSSVYLQMNSLRAEDTAVYYCARDRVTATLYAMDYW |
| | | | GQGTLVTVSS |
| SEQ ID NO: 3078 | VH | C-H-VH.39 | EVQLVESGGGLVQPGGSLKLSCAVSGFSLTAYGVNWV |
| | | | RQASGKGLEWLGMIWGDGNTDYNSALKSRLTISKDNS |
| | | | KSTVYLQMNSLKTEDTAVYYCARDRVTATLYAMDYW |
| | | | GQGTLVTVSS |
| SEQ ID NO: 3079 | VH | C-H-VH.40 | QVQLLESGGGLVKPGGSLRLSCAVSGFSLTAYGVNWV |
| | | | RQAPGKGLEWLGMIWGDGNTDYNSALKSRLTISKDNA |
| | | | KSSVYLQMNSLRAEDTAVYYCARDRVTATLYAMDYW |
| | | | GQGTLVTVSS |
| SEQ ID NO: 3080 | VH | C-H-VH.41 | QVQLVESGGGVVQPGRSLRLSCAVSGFSLTAYGVNWV |
| | | | RQAPGKGLEWLGMIWGDGNTDYNSALKSRLTISKDNS |
| | | | KSTVYLQMNSLRAEDTAVYYCARDRVTATLYAMDYW |
| | | | GQGTLVTVSS |
| SEQ ID NO: 3081 | VH | C-H-VH.42 | QVQLVESGGGVVQPGRSLRLSCAVSGFSLTAYGVNWV |
| | | | RQAPGKGLEWLGMIWGDGNTDYNSALKSRLTISKDNS |
| | | | KSRVYLQMNSLRAEDTAVYYCARDRVTATLYAMDYW |
| | | | GQGTLVTVSS |
| SEQ ID NO: 3082 | VH | C-H-VH.43 | QVQLVESGGGVVQPGRSLRLSCAVSGFSLTAYGVNWV |
| | | | RQAPGKGLEWLGMIWGDQNTDYNSALKSRLAISKDNS |
| | | | KSTVYLQMNSLRAEDTAVYYCARDRVTATLYAMDYW |
| | | | GQGTLVTVSS |
| SEQ ID NO: 3083 | VH | C-H-VH.44 | QVQLVESGGGVVQPGGSLRLSCAVSGFSLTAYGVNWV |
| | | | RQAPGKGLEWLGMIWGDGNTDYNSALKSRLTISKDNS |
| | | | KSTVYLQMNSLRAEDTAVYYCARDRVTATLYAMDYW |
| | | | GQGTLVTVSS |
| SEQ ID NO: 3084 | VH | C-H-VH.45 | EVQLVESQGGLVQPGGSLRLSCAVSGFSLTAYGVNWV |
| | | | RQAPGKGLEWLGMIWQDGNTDYNSALKSRLTISKDNA |
| | | | KSTVYLQMNSLRAEDTAVYYCARDRVTATLYAMDYW |
| | | | GQGTLVTVSS |
| SEQ ID NO: 3085 | VH | C-H-VH.46 | EVQLVESGGGLVQPGGSLRLSCAVSGFSLTAYGVNWV |
| | | | RQAPGKGLEWLGMIWGDGNTDYNSALKSRLTISKDNA |
| | | | KSSVYLQMNSLRAEDTAVYYCARDRVTATLYAMDYW |
| | | | GQGTLVTVSS |
| SEQ ID NO: 3086 | VH | C-H-VH.47 | EVQLVESGGVVVQPGGSLRLSCAVSGFSLTAYGVNWV |
| | | | RQAPGKGLEWLGMIWGDGNTDYNSALKSRLTISKDNS |
| | | | KSSVYLQMNSLRTEDTALYYCARDRVTATLYAMDYW |
| | | | GQGTLVTVSS |
| SEQ ID NO: 3087 | VH | C-H-VH.48 | EVQLVESGGGLVQPGGSLRLSCAVSGFSLTAYGVNWV |
| | | | RQAPGKGLEWLGMIWGDGNTDYNSALKSRLTISKHNS |
| | | | KSTVYLQMNSLRAEDTAVYYCARDRVTATLYAMDYW |
| | | | GQGTLVTVSS |
| SEQ ID NO: 3088 | VH | C-H-VH.49 | EVQLVESGGGLVKPGGSLRLSCAVSGFSLTAYGVNWV |
| | | | RQAPGKGLEWLGMIWGDGNTDYNSALKSRLTISKDNA |
| | | | KSSVYLQMNSLRAEDTAVYYCARDRVTATLYAMDYW |
| | | | GQGTLVTVSS |
| SEQ ID NO: 3089 | VH | C-H-VH.50 | EVQLVESGGGLIQPGGSLRLSCAVSGFSLTAYGVNWVR |
| | | | QPPGKGLEWLGMIWGDGNTDYNSALKSRLTISKDNSKS |
| | | | TVYLQMNSLRAEDTAVYYCARDRVTATLYAMDYWGQ |
| | | | GTLVTVSS |

TABLE 11
Amino acid sequences for anti TCRβ V5 antibodies. Amino acid and nucleotide sequences for
murine and humanized antibody molecules which bind to TCRVB 5 (e.g., TCRVB 5-5 or TCRVB 5-6).
The amino acid the heavy and light chain CDRs, and the amino acid and nucleotide sequences
of the heavy and light chain variable regions, and the heavy and light chains are shown.
Murine antibody E, also referred to as MH3-2

| | | |
|---|---|---|
| SEQ ID NO: 1298 | HC CDR1 (Kabat) | SSWMN |
| SEQ ID NO: 1299 | HC CDR2 (Kabat) | RIYPGDGDTKYNGKFKG |
| SEQ ID NO: 1300 | HC CDR3 (Kabat) | RGTGGWYFDV |
| SEQ ID NO: 1302 | HC CDR1 (Chothia) | GYAFSSS |
| SEQ ID NO: 1303 | HC CDR2 (Chothia) | YPGDGD |
| SEQ ID NO: 1301 | HC CDR3 (Chothia) | RGTGGWYFDV |
| SEQ ID NO: 1304 | HC CDR1 (Combined) | GYAFSSSWMN |
| SEQ ID NO: 1299 | HC CDR2 (Combined)) | RIYPGDGDTKYNGKFKG |
| SEQ ID NO: 1301 | HC CDR3 (Combined) | RGTGGWYFDV |
| SEQ ID NO: 1305 | LC CDR1 (Kabat) | RASESVDSSGNSFMH |
| SEQ ID NO: 1306 | LC CDR2 (Kabat) | RASNLES |
| SEQ ID NO: 1307 | LC CDR3 (Kabat) | QQSFDDPFT |
| SEQ ID NO: 1308 | LC CDR1 (Chothia) | SESVDSSGNSF |
| SEQ ID NO: 1306 | LC CDR2 (Chothia) | RASNLES |
| SEQ ID NO: 1307 | LC CDR3 (Chothia) | QQSFDDPFT |
| SEQ ID NO: 1305 | LC CDR1 (Combined) | RASESVDSSGNSFMH |
| SEQ ID NO: 1306 | LC CDR2 (Combined) | RASNLES |
| SEQ ID NO: 1307 | LC CDR3 (Combined) | QQSFDDPFT |
| SEQ ID NO: 3091 | VH | QVQLQQSGPELVKPGASVKISCKASGYAFSSSWMNWV |
| | | KQRPGQGLEWIGRIYPGDGDTKYNGKFKGKATLTADKS |
| | | SSTAYMHLSSLTSVDSAVYFCARRGTGGWYFDVWGAG |
| | | TTVTVSS |
| SEQ ID NO: 3284 | Heavy chain | METDTLLLWVLLLWVPGSTGQVQLQQSGPELVKPGAS |
| | | VKISCKASGYAFSSSWMNWVKQRPGQGLEWIGRIYPGD |
| | | GDTKYNGKFKGKATLTADKSSSTAYMHLSSLTSVDSAV |
| | | YFCARRGTGGWYFDVWGAGTTVTVSSAKTTAPSVYPL |
| | | APVCGDTTGSSVTLGCLVKGYFPEPVTLTWNSGSLSSG |
| | | VHTFPAVLQSDLYTLSSSVTVTSSTWPSQSITCNVAHPA |
| | | SSTKVDKKIEPRGPTIKPCPPCKCPAPNLLGGPSVFIFPPK |
| | | IKDVLMISLSPIVTCVVVDVSEDDPDVQISWFVNNVEVH |
| | | TAQTQTHREDYNSTLRVVSALPIQHQDWMSGKEFKCK |
| | | VNNKDLPAPIERTISKPKGSVRAPQVYVLPPPEEEMTKK |
| | | QVTLTCMVTDFMPEDIYVEWTNNGKTELNYKNTEPVL |
| | | DSDGSYFMYSKLRVEKKNWVERNSYSCSVVHEGLHNH |
| | | HTTKSFSRTPGK |
| SEQ ID NO: 3092 | VL | DIVLTQSPASLAVSLGQRATISCRASESVDSSGNSFMHW |
| | | YQQKPGQPPQLLIYRASNLESGIPARFSGSGSRTDFTLTI |
| | | NPVEADDVATFYCQQSFDDPFTFGSGTKLEIK |
| SEQ ID NO: 3285 | Light chain | METDTLLLWVLLLWVPGSTGDIVLTQSPASLAVSLGQR |
| | | ATISCRASESVDSSGNSFMHWYQQKPGQPPQLLIYRASN |
| | | LESGIPARFSGSGSRTDFTLTINPVEADDVATFYCQQSFD |
| | | DPFTFGSGTKLEIKRADAAPTVSIFPPSSEQLTSGGASVV |
| | | CFLNNFYPKDINVKWKIDGSERQNGVLNSWTDQDSKDS |
| | | TYSMSSTLTLTKDEYERHNSYTCEATHKTSTSPIVKSEN |
| | | RNEC |

Humanized antibody E (E-H antibody)
Variable light chain (VL)

| | | | |
|---|---|---|---|
| SEQ ID NO: 3093 | VL | E-H.1 | DIVLTQSPDSLAVSLGERATINCRASESVDSSGNSFMHWYQQ |
| | | | KPGQPPQLLIYRASNLESGVPDRFSGSGSRTDFTLTISSLQAED |
| | | | VAVYYCQQSFDDPFTFGQGTKLEIK |
| SEQ ID NO: 3094 | VL | E-H.2 | EIVLTQSPATLSLSPGERATLSCRASESVDSSGNSFMHWYQQ |
| | | | KPGQAPQLLIYRASNLESGIPARFSGSGSRTDFTLTISSLEPEDF |
| | | | AVYYCQQSFDDPFTFGQGTKLEIK |
| SEQ ID NO: 3095 | VL | E-H.3 | EIVLTQSPATLSLSPGERATLSCRASESVDSSGNSFMHWYQQ |
| | | | KPGQAPQLLIYRASNLESGIPARFSGSGSRTDFTLTISRLEPED |
| | | | FAVYYCQQSFDDPFTFGQGTKLEIK |
| SEQ ID NO: 3096 | VL | E-H.4 | EIVLTQSPATLSLSPGERATLSCRASESVDSSGNSFMHWYQQ |
| | | | KPGQAPQLLIYRASNLESGIPARFSGSGSRTDFTLTISSLQPED |
| | | | FAVYYCQQSFDDPFTFGQGTKLEIK |
| SEQ ID NO: 3097 | VL | E-H.5 | DIQLTQSPSSLSASVGDRVTITCRASESVDSSGNSFMHWYQQ |
| | | | KPGQAPQLLIYRASNLESGVPSRFSGSGSRTDFTLTISSLQPED |
| | | | VATYYCQQSFDDPFTFGQGTKLEIK |
| SEQ ID NO: 3098 | VL | E-H.6 | EIVLTQSPATLSLSPGERATLSCRASESVDSSGNSFMHWYQQ |
| | | | KPGQAPQLLIYRASNLESGIPARFSGSGPRIDFTLTISSLEPEDF |
| | | | AVYYCQQSEDDPFTFGQGTKLEIK |
| SEQ ID NO: 3099 | VL | E-H.7 | EIVLTQSPATLSLSPGERATLSCRASESVDSSGNSFMHWYQQ |
| | | | KPGQAPQLLIYRASNLESGIPDRFSGSGSRTDFTLTISRLEPED |
| | | | FAVYYCQQSFDDPFTFGQGTKLEIK |
| SEQ ID NO: 3100 | VL | E-H.8 | DIQLTQSPSSLSASVGDRVTITCRASESVDSSGNSFMHWYQQ |
| | | | KPGKVPQLLIYRASNLESGVPSRFSGSGSRTDFTLTISSLQPED |
| | | | VATYYCQQSFDDPFTFGQGTKLEIK |
| SEQ ID NO: 3101 | VL | E-H.9 | DIQLTQSPSSLSASVGDRVTITCRASESVDSSGNSFMHWYQQ |
| | | | KPGKTPQLLIYRASNLESGIPSRFSGSGSRTDFTLTIRSLQPEDF |
| | | | ATYYCQQSFDDPFTFGQGTKLEIK |
| SEQ ID NO: 3102 | VL | E-H.10 | EIVLTQSPGTLSLSPGERATLSCRASESVDSSGNSFMHWYQQ |
| | | | KPGQAPQLLIYRASNLESGIPDRFSGSGSRTDFTLTISRLEPED |
| | | | FAVYYCQQSFDDPFTFGQGTKLEIK |
| SEQ ID NO: 3103 | VL | E-H.11 | EIVLTQSPATLSLSPGERATLSCRASESVDSSGNSFMHWYQQ |
| | | | KPGLAPQLLIYRASNLESGIPDRFSGSGSRTDFTLTISRLEPEDF |
| | | | AVYYCQQSFDDPFTFGQGTKLEIK |
| SEQ ID NO: 3104 | VL | E-H.12 | DIQLTQSPSSLSASVGDRVTITCRASESVDSSGNSFMHWYQQ |
| | | | KPGKAPQLLIYRASNLESGVPSRFSGSGSRTDFTLTISSLQPED |
| | | | FATYYCQQSFDDPFTFGQGTKLEIK |
| SEQ ID NO: 3105 | VL | E-H.13 | DIQLTQSPSSVSASVGDRVTITCRASESVDSSQNSFMHWYQQ |
| | | | KPGKAPQLLIYRASNLESGVPSRFSGSGSRTDFTLTISSLQPED |
| | | | FATYYCQQSFDDPFTFGQGTKLEIK |
| SEQ ID NO: 3106 | VL | E-H.14 | AIQLTQSPSSLSASVGDRVTITCRASESVDSSGNSFMHWYQQ |
| | | | KPGKAPQLLIYRASNLESGVPSRFSGSGSRTDFTLTISSLQPED |
| | | | FATYYCQQSFDDPFTFGQGTKLEIK |
| SEQ ID NO: 3107 | VL | E-H.15 | DIQLTQSPSFLSASVGDRVTITCRASESVDSSGNSFMHWYQQ |
| | | | KPGKAPQLLIYRASNLESGVPSRFSGSGSRTEFTLTISSLQPED |
| | | | FATYYCQQSFDDPFTFGQGTKLEIK |
| SEQ ID NO: 3108 | VL | E-H.16 | DIQLTQSPSSLSASVGDRVTITCRASESVDSSQNSFMHWYQQ |
| | | | KPGKAPQLLIYRASNLESGVPSRFSGSGSRTDFTFTISSLQPEDI |
| | | | ATYYCQQSFDDPFTFGQGTKLEIK |
| SEQ ID NO: 3109 | VL | E-H.17 | EIVLTQSPATLSVSPGERATLSCRASESVDSSGNSFMHWYQQ |
| | | | KPGQAPQLLIYRASNLESGIPARFSGSGSRTEFTLTISILQSEDF |
| | | | AVYYCQQSFDDPFTFGQGTKLEIK |
| SEQ ID NO: 3110 | VL | E-H.18 | EIVLTQSPATLSVSPGERATLSCRASESVDSSGNSFMHWYQQ |
| | | | KPGQAPQLLIYRASNLESGIPARFSGSGSRTEFTLTISSLQSEDF |
| | | | AVYYCQQSFDDPFTFGQGTKLEIK |
| SEQ ID NO: 3111 | VL | E-H.19 | AIRLTQSPFSLSASVGDRVTITCRASESVDSSGNSFMHWYQQ |
| | | | KPAKAPQLFIYRASNLESGVPSRFSGSGSRTDFTLTISSLQPED |
| | | | FATYYCQQSFDDPFTFGQGTKLEIK |
| SEQ ID NO: 3112 | VL | E-H.20 | DIQLTQSPSSLSASVGDRVTITCRASESVDSSQNSFMHWYQQ |
| | | | KPGKAPQSLIYRASNLESGVPSRFSGSGSRTDFTLTISSLQPED |
| | | | FATYYCQQSFDDPFTFGQGTKLEIK |
| SEQ ID NO: 3113 | VL | E-H.21 | DIQLTQSPSSLSASVGDRVTITCRASESVDSSGNSFMHWYQQ |
| | | | KPGKAPQRLIYRASNLESGVPSRFSGSGSRTEFTLTISNLQPED |
| | | | FATYYCQQSFDDPFTFGQGTKLEIK |
| SEQ ID NO: 3114 | VL | E-H.22 | DIQLTQSPSTLSASVGDRVTITCRASESVDSSGNSFMHWYQQ |
| | | | KPGKAPQLLIYRASNLESGVPSRFSGSGSRTEFTLTISSLQPDD |
| | | | FATYYCQQSFDDPFTFGQGTKLEIK |
| SEQ ID NO: 3115 | VL | E-H.23 | EIVLTQSPDFQSVTPKEKVTITCRASESVDSSGNSFMHWYQQ |
| | | | KPDQSPQLLIYRASNLESGVPSRFSGSGSRTDFTLTINSLEAED |
| | | | AATYYCQQSFDDPFTFGQGTKLEIK |
| SEQ ID NO: 3116 | VL | E-H.24 | DIQLTQSPSSLSASVGDRVTITCRASESVDSSGNSEMHWYQQ |
| | | | KPGKAPQSLIYRASNLESGVPSKFSGSGSRTDFTLTISSLQPED |
| | | | FATYYCQQSFDDPFTFGQGTKLEIK |
| SEQ ID NO: 3117 | VL | E-H.25 | DIQLTQSPSSLSASVGDRVTITCRASESVDSSGNSFMHWYQQ |
| | | | KPGKAPQRLIYRASNLESGVPSRFSGSGSRTEFTLTISSLQPED |
| | | | FATYYCQQSFDDPFTFGQGTKLEIK |
| SEQ ID NO: 3118 | VL | E-H.26 | DIVLTQTPLSLSVTPGQPASISCRASESVDSSGNSFMHWYLQK |
| | | | PGQPPQLLIYRASNLESGVPDRFSGSGSRTDFTLKISRVEAED |
| | | | VGVYYCQQSFDDPFTFGQGTKLEIK |
| SEQ ID NO: 3119 | VL | E-H.27 | DIQLTQSPSSLSASVGDRVTITCRASESVDSSGNSFMHWYQQ |
| | | | KPEKAPQSLIYRASNLESGVPSRFSGSGSRTDFTLTISSLQPED |
| | | | FATYYCQQSFDDPFTFGQGTKLEIK |
| SEQ ID NO: 3120 | VL | E-H.28 | EIVLTQSPPTLSLSPGERVTLSCRASESVDSSGNSFMHWYQQK |
| | | | PGQAPQLLIYRASNLESGIPARFSGSGSRTDFTLTISSLQPEDF |
| | | | AVYYCQQSFDDPFTFGQGTKLEIK |
| SEQ ID NO: 3121 | VL | E-H.29 | DIQLTQSPSAMSASVGDRVTITCRASESVDSSGNSFMHWYQQ |
| | | | KPGKVPQRLIYRASNLESGVPSRFSGSGSRTEFTLTISSLQPED |
| | | | FATYYCQQSFDDPFTFGQGTKLEIK |
| SEQ ID NO: 3122 | VL | E-H.30 | DIVLTQSPLSLPVTPGEPASISCRASESVDSSGNSFMHWYLQK |
| | | | PGQSPQLLIYRASNLESGVPDRFSGSGSRTDFTLKISRVEAED |
| | | | VGVYYCQQSFDDPFTFGQGTKLEIK |
| SEQ ID NO: 3123 | VL | E-H.31 | DIVLTQTPLSLPVTPGEPASISCRASESVDSSGNSFMHWYLQK |
| | | | PGQSPQLLIYRASNLESGVPDRFSGSGSRTDFTLKISRVEAED |
| | | | VGVYYCQQSFDDPFTFGQGTKLEIK |
| SEQ ID NO: 3124 | VL | E-H.32 | DIVLTQTPLSLSVTPGQPASISCRASESVDSSGNSFMHWYLQK |
| | | | PGQSPQLLIYRASNLESGVPDRFSGSGSRTDFTLKISRVEAED |
| | | | VGVYYCQQSFDDPFTFGQGTKLEIK |
| SEQ ID NO: 3125 | VL | E-H.33 | EIVLTQSPPTLSLSPGERVTLSCRASESVDSSGNSFMHWYQQK |
| | | | PGQAPQLLIYRASNLESSIPARFSGSGSRTDFTLTISSLQPEDFA |
| | | | VYYCQQSFDDPFTFGQGTKLEIK |
| SEQ ID NO: 3126 | VL | E-H.34 | DIVLTQSPLSLPVTLGQPASISCRASESVDSSGNSFMHWYQQR |
| | | | PGQSPQRLIYRASNLESQVPDRFSGSGSRTDFTLKISRVEAED |
| | | | VGVYYCQQSFDDPFTFGQGTKLEIK |
| SEQ ID NO: 3127 | VL | E-H.35 | DIVLTQTPLSSPVTLGQPASISCRASESVDSSGNSFMHWYQQR |
| | | | PGQPPQLLIYRASNLESGVPDRFSGSGARTDFTLKISRVEAED |
| | | | VGVYYCQQSFDDPFTFGQGTKLEIK |
| SEQ ID NO: 3128 | VL | E-H.36 | DIVLTQSPAFLSVTPGEKVTITCRASESVDSSGNSFMHWYQQ |
| | | | KPDQAPQLLIYRASNLESGVPSRFSGSGSRTDFTFTISSLEAED |
| | | | AATYYCQQSFDDPFTFGQGTKLEIK |
| SEQ ID NO: 3129 | VL | E-H.37 | DIQLIQSPSFLSASVGDRVSIICRASESVDSSGNSFMHWYLQKP |
| | | | GKSPQLFIYRASNLESGVSSRFSGRGSRTDFTLTIISLKPEDFA |
| | | | AYYCQQSFDDPFTFGQGTKLEIK |
| SEQ ID NO: 3130 | VL | E-H.38 | EIVLTQTPLSLSITPGEQASISCRASESVDSSGNSFMHWYLQK |
| | | | ARPVPQLLIYRASNLESGVPDRFSGSGSRTDFTLKISRVEAED |
| | | | FGVYYCQQSFDDPFTFGQGTKLEIK |
| SEQ ID NO: 3131 | VL | E-H.39 | EIVLTQTPLSLSITPGEQASMSCRASESVDSSGNSFMHWYLQK |
| | | | ARPVPQLLIYRASNLESGVPDRFSGSGSRTDFTLKISRVEAED |
| | | | FGVYYCQQSFDDPFTFGQGTKLEIK |
| SEQ ID NO: 3132 | VL | E-H.40 | EITLTQSPAFMSATPGDKVNISCRASESVDSSGNSFMHWYQQ |
| | | | KPGEAPQFIIYRASNLESGIPPRFSGSGYRTDFTLTINNIESEDA |
| | | | AYYYCQQSFDDPFTFGQGTKLEIK |

Variable HEAVY chain (VH)

| | | | |
|---|---|---|---|
| SEQ ID NO: 3133 | VH | E-H.1 | QVQLVQSGAEVKKPGASVKVSCKASGYAFSSSWMNWVRQA |
| | | | PGQGLEWIGRIYPGDGDTKYNGKFKGRATLTADKSTSTAYM |
| | | | ELSSLRSEDTAVYYCARRGTGGWYFDVWGQGTTVTVSS |
| SEQ ID NO: 3134 | VH | E-H.2 | QVQLVQSGAEVKKPGSSVKVSCKASGYAFSSSWMNWVRQA |
| | | | PGQGLEWIGRIYPGDGDTKYNGKFKGRATLTADKSTSTAYM |
| | | | ELSSLRSEDTAVYYCARRGTGGWYFDVWGQGTTVTVSS |
| SEQ ID NO: 3135 | VH | E-H.3 | QVQLVQSGAEVKKPGASVKVSCKASGYAFSSSWMNWVRQA |
| | | | PGKGLEWIGRIYPGDGDTKYNGKFKGRATLTADKSTSTAYM |
| | | | ELSSLRSEDTAVYYCARRGTGGWYFDVWGQGTTVTVSS |
| SEQ ID NO: 3136 | VH | E-H.4 | QVQLVQSGAEVKKPGASVKVSCKASGYAFSSSWMNWVRQA |
| | | | PGQELEWIGRIYPGDGDTKYNGKFKGRATLTADKSISTAYME |
| | | | LSSLRSEDTATYYCARRGTGGWYFDVWGQGTTVTVSS |
| SEQ ID NO: 3137 | VH | E-H.5 | EVQLVQSGAEVKKPGATVKISCKASGYAFSSSWMNWVQQA |
| | | | PGKGLEWIGRIYPGDGDTKYNGKFKGRATLTADKSTSTAYM |
| | | | ELSSLRSEDTAVYYCARRGTGGWYFDVWGQGTTVTVSS |
| SEQ ID NO: 3138 | VH | E-H.6 | QVQLVQSGAEVKKTGSSVKVSCKASGYAFSSSWMNWVRQA |
| | | | PGQALEWIGRIYPGDGDTKYNGKFKGRATLTADKSMSTAYM |
| | | | ELSSLRSEDTAMYYCARRGTGGWYFDVWGQGTTVTVSS |
| SEQ ID NO: 3139 | VH | E-H.7 | QVQLVQSGAEVKKPGASVKVSCKASGYAFSSSWMNWVRQA |
| | | | PGQRLEWIGRIYPGDGDTKYNGKFKGRATLTADKSASTAYM |
| | | | ELSSLRSEDMAVYYCARRGTGGWYFDVWGQGTTVTVSS |
| SEQ ID NO: 3140 | VH | E-H.8 | QVQLVQSGAEVKKPGASVKVSCKASGYAFSSSWMNWVRQA |
| | | | PGQGLEWIGRIYPGDGDTKYNGKFKGRATLTADKSTSTAYM |
| | | | ELRSLRSDDMAVYYCARRGTGGWYFDVWGQGTTVTVSS |
| SEQ ID NO: 3141 | VH | E-H.9 | QVQLVQSGAEVKKPGASVKVSCKASGYAFSSSWMNWVRQA |
| | | | PGQRLEWIGRIYPGDGDTKYNGKFKGRATLTADKSASTAYM |
| | | | ELSSLRSEDTAVYYCARRGTGGWYFDVWGQGTTVTVSS |
| SEQ ID NO: 3142 | VH | E-H.10 | QVQLVQSGAEVKKPGASVKVSCKASGYAFSSSWMNWVRQA |
| | | | PGQGLEWIGRIYPGDGDTKYNGKFKGRATLTADKSTSTAYM |
| | | | ELRSLRSDDTAVYYCARRGTGGWYFDVWGQGTTVTVSS |
| SEQ ID NO: 3143 | VH | E-H.11 | QVQLVQSGAEVKKPGASVKVSCKASGYAFSSSWMNWVRQA |
| | | | PGQGLEWIGRIYPGDGDTKYNGKFKGRATLTADKSISTAYM |
| | | | ELSRLRSDDTAVYYCARRGTGGWYFDVWGQGTTVTVSS |
| SEQ ID NO: 3144 | VH | E-H.12 | QVQLVQSGAEVKKPGASVKVSCKASGYAFSSSWMNWVRQA |
| | | | PGQGLEWIGRIYPGDQDTKYNGKFKGRATLTADKSISTAYM |
| | | | ELSRLRSDDTVVYYCARRQTGGWYFDVWGQGTTVTVSS |
| SEQ ID NO: 3145 | VH | E-H.13 | QVQLVQSGAEVKKPGASVKVSCKASGYAFSSSWMNWVRQA |
| | | | PGQGLEWIGRIYPGDGDTKYNGKFKGWATLTADKSISTAYM |
| | | | ELSRLRSDDTAVYYCARRGTGGWYFDVWGQGTTVTVSS |
| SEQ ID NO: 3146 | VH | E-H.14 | QVQLVQSGAEVKKPGASVKVSCKASGYAFSSSWMNWVRQA |
| | | | TGQGLEWIGRIYPGDGDTKYNGKFKGRATLTANKSISTAYM |
| | | | ELSSLRSEDTAVYYCARRGTGGWYFDVWGQGTTVTVSS |
| SEQ ID NO: 3147 | VH | E-H.15 | QVQLVQSGSELKKPGASVKVSCKASGYAFSSSWMNWVRQA |
| | | | PGQGLEWIGRIYPGDGDTKYNGKFKGRAVLSADKSVSTAYL |
| | | | QISSLKAEDTAVYYCARRGTGGWYFDVWGQGTTVTVSS |
| SEQ ID NO: 3148 | VH | E-H.16 | QVQLVQSGPEVKKPGTSVKVSCKASGYAFSSSWMNWVRQA |
| | | | RGQRLEWIGRIYPGDGDTKYNGKFKGRATLTADKSTSTAYM |
| | | | ELSSLRSEDTAVYYCARRGTGGWYFDVWGQGTTVTVSS |
| SEQ ID NO: 3149 | VH | E-H.17 | EVQLVQSGAEVKKPGESLKISCKASGYAFSSSWMNWVRQMP |
| | | | GKGLEWIGRIYPGDGDTKYNGKFKGQATLSADKSISTAYLQ |
| | | | WSSLKASDTAMYYCARRGTGGWYFDVWGQGTTVTVSS |
| SEQ ID NO: 3150 | VH | E-H.18 | QVQLVQSGSELKKPGASVKVSCKASGYAFSSSWMNWVRQA |
| | | | PGQGLEWIGRIYPGDGDTKYNGKFKGRAVLSADKSVSMAYL |
| | | | QISSLKAEDTAVYYCARRGTGGWYFDVWGQGTTVTVSS |
| SEQ ID NO: 3151 | VH | E-H.19 | QVQLVQSGHEVKQPGASVKVSCKASGYAFSSSWMNWVPQA |
| | | | PGQGLEWIGRIYPGDGDTKYNGKFKGRAVLSADKSASTAYL |
| | | | QISSLKAEDMAMYYCARRGTGGWYFDVWGQGTTVTVSS |
| SEQ ID NO: 3152 | VH | E-H.20 | EVQLVQSGAEVKKPGESLKISCKASGYAFSSSWMNWVRQMP |
| | | | GKGLEWIGRIYPGDGDTKYNGKFKGQATLSADKPISTAYLQ |
| | | | WSSLKASDTAMYYCARRGTGGWYFDVWGQGTTVTVSS |
| SEQ ID NO: 3153 | VH | E-H.21 | EVQLVQSGAEVKKPGESLRISCKASGYAFSSSWMNWVRQMP |
| | | | GKGLEWIGRIYPGDGDTKYNGKFKGQATLSADKSISTAYLQ |
| | | | WSSLKASDTAMYYCARRGTGGWYFDVWGQGTTVTVSS |
| SEQ ID NO: 3154 | VH | E-H.22 | EVQLVQSGAEVKKPGESLRISCKASGYAFSSSWMNWVRQMP |
| | | | GKGLEWIGRIYPGDGDTKYNGKFKGHATLSADKSISTAYLQ |
| | | | WSSLKASDTAMYYCARRGTGGWYFDVWGQGTTVTVSS |
| SEQ ID NO: 3155 | VH | E-H.23 | QVQLVQSGAEVKKTGSSVKVSCKASGYAFSSSWMNWVRQA |
| | | | PRQALEWIGRIYPGDGDTKYNGKFKGRATLTADKSMSTAYM |
| | | | ELSSLRSEDTAMYYCARRGTGGWYFDVWGQGTTVTVSS |
| SEQ ID NO: 3156 | VH | E-H.24 | EVQLVESGGGLVQPGRSLRLSCTASGYAFSSSWMNWVRQAP |
| | | | GKGLEWIGRIYPGDGDTKYNGKFKGRATLSADKSKSIAYLQ |
| | | | MNSLKTEDTAVYYCARRGTGGWYFDVWGQGTTVTVSS |
| SEQ ID NO: 3157 | VH | E-H.25 | EVQLVESGGGLVQPGPSLRLSCTASGYAFSSSWMNWVRQAP |
| | | | GKGLEWIGRIYPGDGDTKYNGKFKGRATLSADKSKSIAYLQ |
| | | | MNSLKTEDTAVYYCARRGTGGWYFDVWGQGTTVTVSS |
| SEQ ID NO: 3158 | VH | E-H.26 | QVQLQESGPGLVKPSQTLSLTCTASGYAFSSSWMNWVRQPP |
| | | | GKGLEWIGRIYPGDGDTKYNGKFKGRATLSADKSKSQASLK |
| | | | LSSVTAADTAVYYCARRGTGGWYFDVWGQGTTVTVSS |
| SEQ ID NO: 3159 | VH | E-H.27 | QVQLQESGPGLVKPSGTLSLTCAASGYAFSSSWMNWVRQPP |
| | | | GKGLEWIGRIYPGDGDTKYNGKFKGRATLSADKSKSQASLK |
| | | | LSSVTAADTAVYYCARRGTGGWYFDVWGQGTTVTVSS |
| SEQ ID NO: 3160 | VH | E-H.28 | EVQLVESGGGLVKPGRSLRLSCTASGYAFSSSWMNWVRQAP |
| | | | GKGLEWIGRIYPGDGDTKYNGKFKGRATLSADKSKSIAYLQ |
| | | | MNSLKTEDTAVYYCARRGTGGWYFDVWGQGTTVTVSS |
| SEQ ID NO: 3161 | VH | E-H.29 | EVQLVESGGGLVQPGGSLKLSCAASGYAFSSSWMNWVRQA |
| | | | SGKGLEWIGRIYPGDGDTKYNGKFKGRATLSADKSKSTAYL |
| | | | QMNSLKTEDTAVYYCARRGTGGWYFDVWGQGTTVTVSS |
| SEQ ID NO: 3162 | VH | E-H.30 | QVQLQESGPGLVKPSQTLSLTCAASGYAFSSSWMNWVRQPP |
| | | | GKGLEWIGRIYPGDQDTKYNGKFKGRATLSADKSKSQASLK |
| | | | LSSVTAADTAVYYCARRGTGQWYFDVWGQGTTVTVSS |
| SEQ ID NO: 3163 | VH | E-H.31 | EVQLVESGGGLVKPGGSLRLSCAASGYAFSSSWMNWVRQA |
| | | | PGKGLEWIGRIYPGDGDTKYNGKFKGRATLSADKSKSTAYL |
| | | | QMNSLKTEDTAVYYCARRGTGGWYFDVWGQGTTVTVSS |
| SEQ ID NO: 3164 | VH | E-H.32 | EVQLVESGGALVKPGGSLRLSCAASGYAFSSSWMNWVRQA |
| | | | PGKGLEWIGRIYPGDGDTKYNGKFKGRATLSADKSKSTAYL |
| | | | QMNSLKTEDTAVYYCARRGTGGWYFDVWGQGTTVTVSS |
| SEQ ID NO: 3165 | VH | E-H.33 | QVQLQESGPGLVKPSQTLSLTCAAYGYAFSSSWMNWVRQPP |
| | | | GKGLEWIGRIYPGDGDTKYNGKFKGRATLSADKSKSQASLK |
| | | | LSSVTAADTAVYYCARRGTGGWYFDVWGQGTTVTVSS |
| SEQ ID NO: 3166 | VH | E-H.34 | QVQLQESGSGLVKPSQTLSLTCAASGYAFSSSWMNWVRQPP |
| | | | GKGLEWIGRIYPGDGDTKYNGKFKGRATLSADKSKSQASLK |
| | | | LSSVTAADTAVYYCARRGTGGWYFDVWGQGTTVTVSS |
| SEQ ID NO: 3167 | VH | E-H.35 | EVQLVESGGGLVQPGGSLRLSCAASGYAFSSSWMNWVRQA |
| | | | PGKGLEWIGRIYPGDGDTKYNGKFKGRATLSADKSKSSAYL |
| | | | QMNSLKTEDTAVYYCARRGTGGWYFDVWGQGTTVTVSS |
| SEQ ID NO: 3168 | VH | E-H.36 | QVQLQESGPGLVKPSDTLSLTCTASGYAFSSSWMNWVRQPP |
| | | | GKGLEWIGRIYPGDGDTKYNGKFKGRATLSADKSKSQASLK |
| | | | LSSVTAADTAVYYCARRGTGGWYFDVWGQGTTVTVSS |
| SEQ ID NO: 3169 | VH | E-H.37 | QVQLQESGPGLVKPSQTLSLTCTASGYAFSSSWMNWVRQHP |
| | | | GKGLEWIGRIYPGDGDTKYNGKFKGRATLSADKSKSQASLK |
| | | | LSSVTAADTAVYYCARRGTGGWYFDVWGQGTTVTVSS |
| SEQ ID NO: 3170 | VH | E-H.38 | QVQLQESGPGLVKPSQTLSLTCTASGYAFSSSWMNWVRQHP |
| | | | GKGLEWIGRIYPGDGDTKYNGKFKGLATLSADKSKSQASLK |
| | | | LSSVTAADTAVYYCARRGTGGWYFDVWGQGTTVTVSS |
| SEQ ID NO: 3171 | VH | E-H.39 | QVQLVESGGGVVQPGRSLRLSCAASGYAFSSSWMNWVRQA |
| | | | PGKGLEWIGRIYPGDGDTKYNGKFKGRATLSADKSKSTAYL |
| | | | QMSSLRAEDTAVYYCARRGTGGWYFDVWGQGTTVTVSS |
| SEQ ID NO: 3172 | VH | E-H.40 | QVQLVESGGGLVKPGGSLRLSCAASGYAFSSSWMNWVRQA |
| | | | PGKGLEWIGRIYPGDGDTKYNGKFKGRATLSADKAKSSAYL |
| | | | QMNSLRAEDTAVYYCARRGTGGWYFDVWGQGTTVTVSS |
| SEQ ID NO: 3173 | VH | E-H.41 | QVQLVESGGGLVQPGGSLRLSCSASGYAFSSSWMNWVRQAP |
| | | | GKGLEWIGRIYPGDGDTKYNGKFKGRATLSADKSKSTAYLQ |
| | | | MNSLRAEDTAVYYCARRGTGGWYFDVWGQGTTVTVSS |
| SEQ ID NO: 3174 | VH | E-H.42 | QVQLLESGGGLVKPGGSLRLSCAASGYAFSSSWMNWVRQA |
| | | | PGKGLEWIGRIYPGDGDTKYNGKFKGRATLSADKAKSSAYL |
| | | | QMNSLRAEDTAVYYCARRGTGGWYFDVWGQGTTVTVSS |
| SEQ ID NO: 3175 | VH | E-H.43 | EVQLVESGGGLVQPGGSLRLSCSASGYAFSSSWMNWVRQAP |
| | | | GKGLEWIGRIYPGDGDTKYNGKFKGRATLSADKSKSTAYLQ |
| | | | MSSLRAEDTAVYYCARRGTGGWYFDVWGQGTTVTVSS |
| SEQ ID NO: 3176 | VH | E-H.44 | QVQLQESGPGLVKPSDTLSLTCAASGYAFSSSWMNWVRQPP |
| | | | GKGLEWIGRIYPGDGDTKYNGKFKGRATISADKSKSQASLK |
| | | | LSSVTAVDTAVYYCARRGTGGWYFDVWGQGTTVTVSS |
| SEQ ID NO: 3177 | VH | E-H.45 | QVQLQESGPGLVKPSQTLSLTCAASGYAFSSSWMNWVRQPP |
| | | | GKGLEWIGRIYPGDGDTKYNGKFKGRATLSADKSKSQASLK |
| | | | LSSVTAVDTAVYYCARRGTGGWYFDVWGQGTTVTVSS |
| SEQ ID NO: 3178 | VH | E-H.46 | EVQLVESGGGLVQPGGSLRLSCSASGYAFSSSWMNWVRQAP |
| | | | GKGLEWIGRIYPGDGDTKYNGKFKGRATLSADKSKSTAYVQ |
| | | | MSSLRAEDTAVYYCARRGTGGWYFDVWGQGTTVTVSS |
| SEQ ID NO: 3179 | VH | E-H.47 | QVQLVDSGGGVVQPGRSLRLSCAASGYAFSSSWMNWVRQA |
| | | | PGKGLEWIGRIYPGDGDTKYNGKFKGRATLSADKSKSTAYL |
| | | | QMNSLRAEDTAVYYCARRGTGGWYFDVWGQGTTVTVSS |
| SEQ ID NO: 3180 | VH | E-H.48 | QVQLVESGGGVVQPGRSLRLSCAASGYAFSSSWMNWVRQA |
| | | | PGKGLEWIGRIYPGDQDTKYNGKFKGRATLSADKSKSTAYL |
| | | | QMNSLRAEGTAVYYCARRGTGGWYFDVWGQGTTVTVSS |
| SEQ ID NO: 3181 | VH | E-H.49 | QVQLVESGGGVVQPGRSLRLSCAASGYAFSSSWMNWVRQA |
| | | | PGKGLEWIGRIYPGDGDTKYNGKFKGRATLSADKSKSTAYL |
| | | | QMNSLRAEDTAVYYCARRGTGGWYFDVWGQGTTVTVSS |
| SEQ ID NO: 3182 | VH | E-H.50 | EVQLVESGGGLVQPGGSLRLSCAASGYAFSSSWMNWVRQA |
| | | | PGKGLEWIGRIYPQDGDTKYNGKFKGRATLSADKSKSTAYL |
| | | | QMNSLRAEDTAVYYCARRQTGGWYFDVWGQGTTVTVSS |

TABLE 12
Amino acid sequences for anti TCRβ V10 antibodies. Amino acid and nucleotide sequences for
murine and humanized antibody molecules which bind to TCRBV 10 (c.g., TCRBV 10-1, TCRBV 10-2
or TCRBV 10-3). The amino acid the heavy and light chain CDRs, and the amino acid and
nucleotide sequences of the heavy and light chain variable regions, and the heavy and light
chains are shown.
Murine antibody D, also referred to as S511 antibody

| | | |
|---|---|---|
| SEQ ID NO: 1288 | HC CDR1 (Kabat) | SYGMS |
| SEQ ID NO: 1289 | HC CDR2 (Kabat) | LISSGGSYTYYTDSVKG |
| SEQ ID NO: 1290 | HC CDR3 (Kabat) | HGGNFFDY |
| SEQ ID NO: 1291 | HC CDR1 (Chothia) | GFTFRSY |
| SEQ ID NO: 1292 | HC CDR2 (Chothia) | SSGGSY |
| SEQ ID NO: 1290 | HC CDR3 (Chothia) | HGGNFFDY |
| SEQ ID NO: 1293 | HC CDR1 (Combined) | GFTFRSYGMS |
| SEQ ID NO: 1289 | HC CDR2 (Combined)) | LISSGGSYTYYTDSVKG |
| SEQ ID NO: 1290 | HC CDR3 (Combined) | HGGNFFDY |
| SEQ ID NO: 1294 | LC CDR1 (Kabat) | SVSSSVSYMH |
| SEQ ID NO: 1295 | LC CDR2 (Kabat) | DTSKLAS |
| SEQ ID NO: 1296 | LC CDR3 (Kabat) | QQWSSNPQYT |
| SEQ ID NO: 1297 | LC CDR1 (Chothia) | SSSVSY |
| SEQ ID NO: 1295 | LC CDR2 (Chothia) | DTSKLAS |
| SEQ ID NO: 1296 | LC CDR3 (Chothia) | QQWSSNPQYT |
| SEQ ID NO: 1294 | LC CDR1 (Combined) | SVSSSVSYMH |
| SEQ ID NO: 1295 | LC CDR2 (Combined) | DTSKLAS |
| SEQ ID NO: 1296 | LC CDR3 (Combined) | QQWSSNPQYT |
| SEQ ID NO: 3183 | VH | EVQLVESGGDLVKPGGSLKLSCAVSGFTFRSYGMSWVR |
| | | QTPDKRLEWVALISSGGSYTYYTDSVKGRFTISRDNAKN |
| | | TLYLQMSSLKSEDTAIYYCSRHGGNFFDYWGQGTTLTVS |
| | | S |
| SEQ ID NO: 3184 | VL | QIVLTQSPSIMSASPGEKVTMTCSVSSSVSYMHWYQQKS |
| | | GTSPKRWIYDTSKLASGVPARFSGSGSGTSYSLTISSMEA |
| | | EDAATYYCQQWSSNPQYTFGGGTKLEIK |

Hamanized antibody D (D-H antibody)
Variable light chain (VL)

| | | | |
|---|---|---|---|
| SEQ ID NO: 3185 | VL | D-H.1 | DIVLTQSPAFLSVTPGEKVTITCSVSSSVSYMHWYQQKPDQAPK |
| | | | LLIYDTSKLASGVPSRFSGSGSGTDYTFTISSLEAEDAATYYCQQ |
| | | | WSSNPQYTFGQGTKLEIK |
| SEQ ID NO: 3186 | VL | D-H.2 | AIQLTQSPSSLSASVGDRVTITCSVSSSVSYMHWYQQKPGKAPK |
| | | | LLIYDTSKLASGVPSRFSGSGSGTDYTLTISSLQPEDFATYYCQQ |
| | | | WSSNPQYYTFGQGTKLEIK |
| SEQ ID NO: 3187 | VL | D-H.3 | DIQLTQSPSFLSASVGDRVTITCSVSSSVSYMHWYQQKPGKAPK |
| | | | LLIYDTSKLASGVPSRFSGSGSGTEYTLTISSLQPEDFATYYCQQ |
| | | | WSSNPQYTFGQGTKLEIK |
| SEQ ID NO: 3188 | VL | D-H.4 | DIQLTQSPSSLSASVGDRVTITCSVSSSVSYMHWYQQKPGKAPK |
| | | | LLIYDTSKLASGVPSRFSGSGSGTDYTLTISSLQPEDFATYYCQQ |
| | | | WSSNPQYTFGQGTKLEIK |
| SEQ ID NO: 3189 | VL | D-H.5 | DIQLTQSPSSVSASVGDRVTITCSVSSSVSYMHWYQQKPGKAPK |
| | | | LLIYDTSKLASGVPSRFSGSGSGTDYTLTISSLQPEDFATYYCQQ |
| | | | WSSNPQYTFGQGTKLEIK |
| SEQ ID NO: 3190 | VL | D-H.6 | DIQLTQSPSSLSASVGDRVTITCSVSSSVSYMHWYQQKPGKVPK |
| | | | LLIYDTSKLASGVPSRFSGSGSGTDYTLTISSLQPEDVATYYCQQ |
| | | | WSSNPQYTFGQGTKLEIK |
| SEQ ID NO: 3191 | VL | D-H.7 | DIQLTQSPSSLSASVGDRVTITCSVSSSVSYMHWYQQKPGQAPK |
| | | | LLIYDTSKLASGVPSRFSGSGSGTDYTLTISSLQPEDVATYYCQQ |
| | | | WSSNPQYTFGQGTKLEIK |
| SEQ ID NO: 3192 | VL | D-H.8 | EIVLTQSPDFQSVTPKEKVTITCSVSSSVSYMHWYQQKPDQSPKL |
| | | | LIYDTSKLASGVPSRFSGSGSGTDYTLTINSLEAEDAATYYCQQ |
| | | | WSSNPQYTFGQGTKLEIK |
| SEQ ID NO: 3193 | VL | D-H.9 | AIRLTQSPFSLSASVGDRVTITCSVSSSVSYMHWYQQKPAKAPK |
| | | | LFIYDTSKLASGVPSRFSGSGSGTDYTLTISSLQPEDFATYYCQQ |
| | | | WSSNPQYTFGQGTKLEIK |
| SEQ ID NO: 3194 | VL | D- | DIQLTQSPSSLSASVGDRVTITCSVSSSVSYMHWYQQKPGKAPK |
| | | H.10 | LLIYDTSKLASGVPSRFSGSGSGTDYTFTISSLQPEDIATYYCQQ |
| | | | WSSNPQYTFGQGTKLEIK |
| SEQ ID NO: 3195 | VL | D- | EIVLTQSPATLSLSPGERATLSCSVSSSVSYMHWYQQKPGQAPK |
| | | H.11 | LLIYDTSKLASGIPARFSGSGSGTDYTLTISSLEPEDFAVYYCQQ |
| | | | WSSNPQYTFGQGTKLEIK |
| SEQ ID NO: 3196 | VL | D- | DIQLTQSPSTLSASVGDRVTITCSVSSSVSYMHWYQQKPGKAPK |
| | | H.12 | LLIYDTSKLASGVPSRFSGSGSGTEYTLTISSLQPDDFATYYCQQ |
| | | | WSSNPQYTFGQGTKLEIK |
| SEQ ID NO: 3197 | VL | D- | DIQLTQSPSSLSASVGDRVTITCSVSSSVSYMHWYQQKPGKTPK |
| | | H.13 | LLIYDTSKLASGIPSRFSGSGSGTDYTLTIRSLQPEDFATYYCQQ |
| | | | WSSNPQYTFGQGTKLEIK |
| SEQ ID NO: 3198 | VL | D- | EIVLTQSPPTLSLSPGERVTLSCSVSSSVSYMHWYQQKPGQAPKL |
| | | H.14 | LIYDTSKLASGIPARFSGSGSGTDYTLTISSLQPEDFAVYYCQQW |
| | | | SSNPQYTFGQGTKLEIK |
| SEQ ID NO: 3199 | VL | D- | DIQLTQSPSSLSASVGDRVTITCSVSSSVSYMHWYQQKPGKAPK |
| | | H.15 | RLIYDTSKLASGVPSRFSGSGSGTEYTLTISSLQPEDFATYYCQQ |
| | | | WSSNPQYTFGQGTKLEIK |
| SEQ ID NO: 3200 | VL | D- | EIVLTQSPATLSLSPGERATLSCSVSSSVSYMHWYQQKPGQAPK |
| | | H.16 | LLIYDTSKLASGIPARFSGSGPGTDYTLTISSLEPEDFAVYYCQQ |
| | | | WSSNPQYTFGQGTKLEIK |
| SEQ ID NO: 3201 | VL | D- | EIVLTQSPATLSLSPGERATLSCSVSSSVSYMHWYQQKPGQAPK |
| | | H.17 | LLIYDTSKLASGIPARFSGSGSGTDYTLTISRLEPEDFAVYYCQQ |
| | | | WSSNPQYTFGQGTKLEIK |
| SEQ ID NO: 3202 | VL | D- | EIVLTQSPATLSLSPGERATLSCSVSSSVSYMHWYQQKPGQAPK |
| | | H.18 | LLIYDTSKLASGIPARFSGSGSGTDYTLTISSLQPEDFAVYYCQQ |
| | | | WSSNPQYTFGQGTKLEIK |
| SEQ ID NO: 3203 | VL | D- | EIVLTQSPATLSVSPGERATLSCSVSSSVSYMHWYQQKPGQAPK |
| | | H.19 | LLIYDTSKLASGIPARFSGSGSGTEYTLTISSLQSEDFAVYYCQQ |
| | | | WSSNPQYTFGQGTKLEIK |
| SEQ ID NO: 3204 | VL | D- | EIVLTQSPATLSVSPGERATLSCSVSSSVSYMHWYQQKPGQAPK |
| | | H.20 | LLIYDTSKLASGIPARFSGSGSGTEYTLTISILQSEDFAVYYCQQW |
| | | | SSNPQYTFGQGTKLEIK |
| SEQ ID NO: 3205 | VL | D- | EIVLTQSPPTLSLSPGERVTLSCSVSSSVSYMHWYQQKPGQAPKL |
| | | H.21 | LIYDTSKLASSIPARFSGSQSGTDYTLTISSLQPEDFAVYYCQQWS |
| | | | SNPQYTFGQGTKLEIK |
| SEQ ID NO: 3206 | VL | D- | DIQLTQSPSSLSASVGDRVTITCSVSSSVSYMHWYQQKPGKAPK |
| | | H.22 | SLIYDTSKLASGVPSRFSGSGSGTDYTLTISSLQPEDFATYYCQQ |
| | | | WSSNPQYTFGQGTKLEIK |
| SEQ ID NO: 3207 | VL | D- | DIQLTQSPSSLSASVGDRVTITCSVSSSVSYMHWYQQKPGKAPK |
| | | H.23 | RLIYDTSKLASGVPSRFSGSGSGTEYTLTISNLQPEDFATYYCQQ |
| | | | WSSNPQYTFGQGTKLEIK |
| SEQ ID NO: 3208 | VL | D- | DIQLTQSPSAMSASVGDRVTITCSVSSSVSYMHWYQQKPGKVPK |
| | | H.24 | RLIYDTSKLASGVPSRFSGSGSGTEYTLTISSLQPEDFATYYCQQ |
| | | | WSSNPQYTFGQGTKLEIK |
| SEQ ID NO: 3209 | VL | D. | EIVLTQSPATLSLSPGERATLSCSVSSSVSYMHWYQQKPGQAPK |
| | | H.25 | LLIYDTSKLASGIPDRFSGSGSGTDYTLTISRLEPEDFAVYYCQQ |
| | | | WSSNPQYTFGQGTKLEIK |
| SEQ ID NO: 3210 | VL | D- | EIVLTQSPATLSLSPGERATLSCSVSSSVSYMHWYQQKPGLAPKL |
| | | H.26 | LIYDTSKLASGIPDRESGSGSGTDYTLTISRLEPEDFAVYYCQQW |
| | | | SSNPQYTFGQGTKLEIK |
| SEQ ID NO: 3211 | VL | D- | EIVLTQSPGTLSLSPGERATLSCSVSSSVSYMHWYQQKPGQAPK |
| | | H.27 | LLIYDTSKLASGIPDRFSGSGSGTDYTLTISRLEPEDFAVYYCQQ |
| | | | WSSNPQYTFGQGTKLEIK |
| SEQ ID NO: 3212 | VL | D- | DIQLTQSPSSLSASVGDRVTITCSVSSSVSYMHWYQQKPGKAPK |
| | | H.28 | SLIYDTSKLASGVPSKFSGSGSGTDYTLTISSLQPEDFATYYCQQ |
| | | | WSSNPQYTFGQGTKLEIK |
| SEQ ID NO: 3213 | VL | D- | DIQLTQSPSSLSASVGDRVTITCSVSSSVSYMHWYQQKPEKAPKS |
| | | H.29 | LIYDTSKLASGVPSRFSGSGSGTDYTLTISSLQPEDFATYYCQQW |
| | | | SSNPQYTFGQGTKLEIK |
| SEQ ID NO: 3214 | VL | D- | DIVLTQSPDSLAVSLGERATINCSVSSSVSYMHWYQQKPGQPPK |
| | | H.30 | LLIYDTSKLASGVPDRFSGSGSGTDYTLTISSLQAEDVAVYYCQQ |
| | | | WSSNPQYTFGQGTKLEIK |
| SEQ ID NO: 3215 | VL | D- | EIVLTQTPLSLSITPGEQASMSCSVSSSVSYMHWYLQKARPVPKL |
| | | H.31 | LIYDTSKLASGVPDRFSGSGSGTDYTLKISRVEAEDFGVYYCQQ |
| | | | WSSNPQYTFGQGTKLEIK |
| SEQ ID NO: 3216 | VL | D- | EIVLTQTPLSLSITPGEQASISCSVSSSVSYMHWYLQKARPVPKLL |
| | | H.32 | IYDTSKLASGVPDRFSGSGSGTDYTLKISRVEAEDFQVYYCQQW |
| | | | SSNPQYTFGQGTKLEIK |
| SEQ ID NO: 3217 | VL | D- | DIVLTQSPLSLPVTPGEPASISCSVSSSVSYMHWYLQKPGQSPKL |
| | | H.33 | LIYDTSKLASGVPDRFSGSGSGTDYTLKISRVEAEDVGVYYCQQ |
| | | | WSSNPQYTFGQGTKLEIK |
| SEQ ID NO: 3218 | VL | D- | DIVLTQSPLSLPVTLGQPASISCSVSSSVSYMHWYQQRPGQSPKR |
| | | H.34 | LIYDTSKLASGVPDRFSGSGSGTDYTLKISRVEAEDVGVYYCQQ |
| | | | WSSNPQYTFGQGTKLEIK |
| SEQ ID NO: 3219 | VL | D- | DIVLTQTPLSLPVTPGEPASISCSVSSSVSYMHWYLQKPGQSPKL |
| | | H.35 | LIYDTSKLASGVPDRFSGSGSGTDYTLKISRVEAEDVGVYYCQQ |
| | | | WSSNPQYTFGQGTKLEIK |
| SEQ ID NO: 3220 | VL | D- | DIVLTQTPLSLSVTPGQPASISCSVSSSVSYMHWYLQKPGQSPKL |
| | | H.36 | LIYDTSKLASGVPDRFSGSGSGTDYTLKISRVEAEDVGVYYCQQ |
| | | | WSSNPQYTFGQGTKLEIK |
| SEQ ID NO: 3221 | VL | D- | DIVLTQTPLSLSVTPGQPASISCSVSSSVSYMHWYLQKPGQPPKL |
| | | H.37 | LIYDTSKLASGVPDRFSGSGSGTDYTLKISRVEAEDVGVYYCQQ |
| | | | WSSNPQYTFGQGTKLEIK |
| SEQ ID NO: 3222 | VL | D. | DIQLIQSPSFLSASVGDRVSIICSVSSSVSYMHWYLQKPGKSPKLF |
| | | H.38 | IYDTSKLASGVSSRFSGRGSGTDYTLTIISLKPEDFAAYYCQQWS |
| | | | SNPQYTFGQGTKLEIK |
| SEQ ID NO: 3223 | VL | D- | DIVLTQTPLSSPVTLGQPASISCSVSSSVSYMHWYQQRPGQPPKL |
| | | H.39 | LIYDTSKLASGVPDRFSGSGAGTDYTLKISRVEAEDVGVYYCQQ |
| | | | WSSNPQYTFGQGTKLEIK |
| SEQ ID NO: 3224 | VL | D- | EITLTQSPAFMSATPGDKVNISCSVSSSVSYMHWYQQKPGEAPK |
| | | H.40 | FIIYDTSKLASGIPPRFSGSGYGTDYTLTINNIESEDAAYYYCQQW |
| | | | SSNPQYTFGQGTKLEIK |

Variable HEAVY chain (VH)

| | | | |
|---|---|---|---|
| SEQ ID NO: 3225 | VH | D-H.1 | EVQLVESGGGLVKPGGSLRLSCAVSGFTFRSYGMSWVRQAPGK |
| | | | GLEWVALISSGGSYTYYTDSVKGRFTISRDNSKNTLYLQMNSLK |
| | | | TEDTAVYYCSRHGGNFFDYWGQGTTVTVSS |
| SEQ ID NO: 3226 | VH | D-H.2 | EVQLVESGGALVKPGGSLRLSCAVSGFTFRSYGMSWVRQAPGK |
| | | | GLEWVALISSGGSYTYYTDSVKGRFTISRDNSKNTLYLQMNSLK |
| | | | TEDTAVYYCSRHGGNFFDYWGQGTTVTVSS |
| SEQ ID NO: 3227 | VH | D-H.3 | EVQLVESGGGLVQPGGSLRLSCAVSGFTFRSYGMSWVRQAPGK |
| | | | GLEWVALISSGGSYTYYTDSVKGRFTISRDNAKNTLYLQMNSLR |
| | | | AEDTAVYYCSRHGGNFFDYWGQGTTVTVSS |
| SEQ ID NO: 3228 | VH | D-H.4 | EVQLVESGGGLVQPGGSLRLSCAVSGFTFRSYGMSWVRQAPGK |
| | | | GLEWVALISSGGSYTYYTDSVKGRFTISRDNAKNSLYLQMNSLR |
| | | | AEDTAVYYCSRHGGNFFDYWGQGTTVTVSS |
| SEQ ID NO: 3229 | VH | D-H.5 | EVQLVESGGGLVQPGGSLRLSCAVSGFTFRSYGMSWVRQAPGK |
| | | | GLEWVALISSGGSYTYYTDSVKGRFTISRDNSKNSLYLQMNSLK |
| | | | TEDTAVYYCSRHGGNFFDYWGQGTTVTVSS |
| SEQ ID NO: 3230 | VH | D-H.6 | EVQLVESGGGLVQPGGSLRLSCAVSGFTFRSYGMSWVRQAPGK |
| | | | GLEWVALISSGGSYTYYTDSVKGRFTISRDNAKNSLYLQMNSLR |
| | | | AEDMAVYYCSRHGGNFFDYWGQGTTVTVSS |
| SEQ ID NO: 3231 | VH | D-H.7 | EVQLVESGGGLVQPGGSLRLSCAVSGFTFRSYGMSWVRQAPGK |
| | | | GLEWVALISSGGSYTYYTDSVKGQFTISRDNAKNTLYLQMNSLR |
| | | | AEDMAVYYCSRHGGNFFDYWGQGTTVTVSS |
| SEQ ID NO: 3232 | VH | D-H.8 | EVQLVESGGGLVKPGRSLRLSCTVSGFTFRSYGMSWVRQAPGK |
| | | | GLEWVALISSGGSYTYYTDSVKGRFTISRDNSKNILYLQMNSLK |
| | | | TEDTAVYYCSRHGGNFFDYWGQGTTVTVSS |
| SEQ ID NO: 3233 | VH | D-H.9 | EVQLVESGGGLVKPGGSLRLSCAVSGFTFRSYGMSWVRQAPGK |
| | | | GLEWVALISSGGSYTYYTDSVKGRFTISRDNAKNSLYLQMNSLR |
| | | | AEDTAVYYCSRHGGNFFDYWGQGTTVTVSS |
| SEQ ID NO: 3234 | VH | D- | EVQLVESGGGLVQPGGSLKLSCAVSGFTFRSYGMSWVRQASGK |
| | | H.10 | GLEWVALISSGGSYTYYTDSVKGRFTISRDNSKNTLYLQMNSLK |
| | | | TEDTAVYYCSRHGGNFFDYWGQGTTVTVSS |
| SEQ ID NO: 3235 | VH | D- | QVQLVESGGGVVQPGGSLRLSCAVSGFTFRSYGMSWVRQAPGK |
| | | H.11 | GLEWVALISSGGSYTYYTDSVKGRFTISRDNSKNTLYLQMNSLR |
| | | | AEDTAVYYCSRHGGNFFDYWGQGTTVTVSS |
| SEQ ID NO: 3236 | VH | D- | QVQLVESGGGVVQPGRSLRLSCAVSGFTFRSYGMSWVRQAPGK |
| | | H.12 | GLEWVALISSGGSYTYYTDSVKGRFTISRDNSKNTLYLQMSSLR |
| | | | AEDTAVYYCSRHGGNFFDYWGQGTTVTVSS |
| SEQ ID NO: 3237 | VH | D- | EVQLVESGGGLVQPGGSLRLSCPVSGFTFRSYGMSWVRQAPGK |
| | | H.13 | GLEWVALISSGGSYTYYTDSVKGRFTISRDNANNSLYLQMNSLR |
| | | | AEDTAVYYCSRHGGNFFDYWGQGTTVTVSS |
| SEQ ID NO: 3238 | VH | D- | EVQLVESGGGLVQPGRSLRLSCTVSGFTFRSYGMSWVRQAPGK |
| | | H.14 | GLEWVALISSGGSYTYYTDSVKGRFTISRDNSKNILYLQMNSLK |
| | | | TEDTAVYYCSRHGGNFFDYWGQGTTVTVSS |
| SEQ ID NO: 3239 | VH | D- | EVQLVESGGGLVQPGPSLRLSCTVSGFTFRSYGMSWVRQAPGK |
| | | H.15 | GLEWVALISSGGSYTYYTDSVKGRFTISRDNSKNILYLQMNSLK |
| | | | TEDTAVYYCSRHGGNFFDYWGQGTTVTVSS |
| SEQ ID NO: 3240 | VH | D- | EVQLVESGGGLVQPGGSLRLSCAVSGFTFRSYGMSWVRQAPGK |
| | | H.16 | GLEWVALISSGGSYTYYTDSVKGRFTISRDNSKNTLYLQMNSLR |
| | | | AEDTAVYYCSRHGGNFFDYWGQGTTVTVSS |
| SEQ ID NO: 3241 | VH | D- | EVQLVESGQGLVQPGGSLRLSCAVSGFTFRSYGMSWVRQAPGK |
| | | H.17 | GLEWVALISSGGSYTYYTDSVKGRFTISRDNAKNSLYLQMNSLR |
| | | | DEDTAVYYCSRHGGNFFDYWGQGTTVTVSS |
| SEQ ID NO: 3242 | VH | D- | QVQLVESGGGLVKPGGSLRLSCAVSGFTFRSYGMSWVRQAPGK |
| | | H.18 | GLEWVALISSGGSYTYYTDSVKGRFTISRDNAKNSLYLQMNSLR |
| | | | AEDTAVYYCSRHGGNFFDYWGQGTTVTVSS |
| SEQ ID NO: 3243 | VH | D- | QVQLVESGGGVVQPGRSLRLSCAVSGFTFRSYGMSWVRQAPGK |
| | | H.19 | GLEWVALISSGGSYTYYTDSVKGRFTISRDNSKNTLYLQMNSLR |
| | | | AEDTAVYYCSRHGGNFFDYWGQGTTVTVSS |
| SEQ ID NO: 3244 | VH | D- | EVQLLESGGGLVQPGGSLRLSCAVSGFTFRSYGMSWVRQAPGK |
| | | H.20 | GLEWVALISSGGSYTYYTDSVKGRFTISRDNSKNTLYLQMNSLR |
| | | | AEDTAVYYCSRHGGNFFDYWGQGTTVTVSS |
| SEQ ID NO: 3245 | VH | D- | EVQLVESGGGLVQPGGSLRLSCAVSGFTFRSYGMSWVRQAPGK |
| | | H.21 | GLEWVALISSGGSYTYYTDSVKGRFTISRHNSKNTLYLQMNSLR |
| | | | AEDTAVYYCSRHGGNFFDYWGQGTTVTVSS |
| SEQ ID NO: 3246 | VH | D- | EVQLVESGGGLIQPGGSLRLSCAVSGFTFRSYGMSWVRQPPGKG |
| | | H.22 | LEWVALISSGGSYTYYTDSVKGRFTISRDNSKNTLYLQMNSLRA |
| | | | EDTAVYYCSRHGGNFFDYWGQGTTVTVSS |
| SEQ ID NO: 3247 | VH | D- | EVQLVESGGGLIQPGGSLRLSCAVSGFTFRSYGMSWVRQAPGK |
| | | H.23 | GLEWVALISSGGSYTYYTDSVKGRFTISRDNSKNTLYLQMNSLR |
| | | | AEDTAVYYCSRHGGNFFDYWGQGTTVTVSS |
| SEQ ID NO: 3248 | VH | D- | EVQLVESGGGLVQPGRSLRLSCAVSGFTFRSYGMSWVRQAPGK |
| | | H.24 | GLEWVALISSGGSYTYYTDSVKGRFTISRDNAKNSLYLQMNSLR |
| | | | AEDTALYYCSRHGGNFFDYWGQGTTVTVSS |
| SEQ ID NO: 3249 | VH | D- | QVQLVESGGGVVQPGRSLRLSCAVSGFTFRSYGMSWVRQAPGK |
| | | H.25 | GLEWVALISSGGSYTYYTDSVKGRFTISRDNSKNRLYLQMNSLR |
| | | | AEDTAVYYCSRHGGNFFDYWGQGTTVTVSS |
| SEQ ID NO: 3250 | VH | D- | QVQLVESGGGVVQPGRSLRLSCAVSGFTFRSYGMSWVRQAPGK |
| | | H.26 | GLEWVALISSGGSYTYYTDSVKGRFTISRDNSKNTLYLQMNSLR |
| | | | AEGTAVYYCSRHGGNFFDYWGQGTTVTVSS |
| SEQ ID NO: 3251 | VH | D- | QVQLVESGGGVVQPGRSLRLSCAVSGFTFRSYGMSWVRQAPGK |
| | | H.27 | GLEWVALISSGGSYTYYTDSVKGRFAISRDNSKNTLYLQMNSLR |
| | | | AEDTAVYYCSRHGGNFFDYWGQGTTVTVSS |
| SEQ ID NO: 3252 | VH | D- | QVQLVDSGGGVVQPGRSLRLSCAVSGFTFRSYGMSWVRQAPG |
| | | H.28 | KGLEWVALISSGGSYTYYTDSVKGRFTISRDNSKNTLYLQMNSL |
| | | | RAEDTAVYYCSRHGGNFFDYWGQGTTVTVSS |
| SEQ ID NO: 3253 | VH | D- | EVQLVESGGGVVRPGGSLRLSCAVSGFTFRSYGMSWVRQAPGK |
| | | H.29 | GLEWVALISSGGSYTYYTDSVKGRFTISRDNAKNSLYLQMNSLR |
| | | | AEDTALYHCSRHGGNFFDYWGQGTTVTVSS |
| SEQ ID NO: 3254 | VH | D- | EVQLVESGGVVVQPGGSLRLSCAVSGFTFRSYGMSWVRQAPGK |
| | | H.30 | GLEWVALISSGGSYTYYTDSVKGRFTISRDNSKNSLYLQMNSLR |
| | | | AEDTALYYCSRHGGNFFDYWGQGTTVTVSS |
| SEQ ID NO: 3255 | VH | D- | EVQLVESGGGVVQPGGSLRLSCAVSGFTFRSYGMSWVRQAPGK |
| | | H.31 | GLEWVALISSGGSYTYYTDSVKGRFTISRDNSKNSLYLQMNSLR |
| | | | TEDTALYYCSRHGGNFFDYWGQGTTVTVSS |
| SEQ ID NO: 3256 | VH | D- | EVQLVESGGVVVQPGGSLRLSCAVSGFTFRSYGMSWVRQAPQK |
| | | H.32 | GLEWVALISSGGSYTYYTDSVKGRFTISRDNSKNSLYLQMNSLR |
| | | | TEDTALYYCSRHGGNFFDYWGQGTTVTVSS |
| SEQ ID NO: 3257 | VH | D- | EVQLVETGGGLIQPGGSLRLSCAVSGFTFRSYGMSWVRQAPGK |
| | | H.33 | GLEWVALISSGGSYTYYTDSVKGRFTISRDNSKNTLYLQMNSLR |
| | | | AEDTAVYYCSRHGGNFFDYWGQGTTVTVSS |
| SEQ ID NO: 3258 | VH | D- | EVQLVESGGGLVQPGGSLRLSCAVSGFTFRSYGMSWVRQATGK |
| | | H.34 | GLEWVALISSGGSYTYYTDSVKGRFTISRENAKNSLYLQMNSLR |
| | | | AGDTAVYYCSRHGGNFFDYWGQGTTVTVSS |
| SEQ ID NO: 3259 | VH | D- | EVQLVESRGVLVQPGGSLRLSCAVSGFTFRSYGMSWVRQAPGK |
| | | H.35 | GLEWVALISSGGSYTYYTDSVKGRFTISRDNSKNTLHLQMNSLR |
| | | | AEDTAVYYCSRHGGNFFDYWGQGTTVTVSS |
| SEQ ID NO: 3260 | VH | D- | EVQLVESGGGLVQPGRSLRLSCAVSGFTFRSYGMSWVRQAPGK |
| | | H.36 | GLEWVALISSGGSYTYYTDSVKGRFTISRDNAKNSLYLQMNSLR |
| | | | AEDMALYYCSRHGGNFFDYWGQGTTVTVSS |
| SEQ ID NO: 3261 | VH | D- | QVQLVESGGGLVQPGGSLRLSCSVSGFTFRSYGMSWVRQAPGK |
| | | H.37 | GLEWVALISSGGSYTYYTDSVKGRFTISRDNSKNTLYLQMNSLR |
| | | | AEDTAVYYCSRHGGNFFDYWGQGTTVTVSS |
| SEQ ID NO: 3262 | VH | D- | EVQLVESGGGLVQPGGSLRLSCSVSGFTFRSYGMSWVRQAPGK |
| | | H.38 | GLEWVALISSGGSYTYYTDSVKGRFTISRDNSKNTLYLQMSSLR |
| | | | AEDTAVYYCSRHGGNFFDYWGQGTTVTVSS |
| SEQ ID NO: 3263 | VH | D. | QVQLVESGGGVVQPGRSLRLSCAVSGFTFRSYGMSWVRQAPGK |
| | | H.39 | GLEWVALISSGGSYTYYTDSVKGRFTISRDNSTNTLFLQMNSLR |
| | | | AEDTAVYYCSRHGGNFFDYWGQGTTVTVSS |
| SEQ ID NO: 3264 | VH | D- | QVQLLESGGGLVKPGGSLRLSCAVSGFTFRSYGMSWVRQAPGK |
| | | H.40 | GLEWVALISSGGSYTYYTDSVKGRFTISRDNAKNSLYLQMNSLR |
| | | | AEDTAVYYCSRHGGNFFDYWGQGTTVTVSS |
| SEQ ID NO: 3265 | VH | D- | EVQLVESGEGLVQPGGSLRLSCAVSGFTFRSYGMSWVRQAPGK |
| | | H.41 | GLEWVALISSGGSYTYYTDSVKGRFTISRDNSKNTLYLQMGSLR |
| | | | AEDMAVYYCSRHGGNFFDYWGQGTTVTVSS |
| SEQ ID NO: 3266 | VH | D- | EVQLVESGGGLVQPGGSLRLSCAVSGFTFRSYGMSWVRQAPGK |
| | | H.42 | GLEWVALISSGGSYTYYTDSVKGRFTISRDNSKNTLYLQMGSLR |
| | | | AEDMAVYYCSRHGGNFFDYWGQGTTVTVSS |
| SEQ ID NO: 3267 | VH | D. | EVQLVESGGGLVQPGGSLRLSCSVSGFTFRSYGMSWVRQAPGK |
| | | H.43 | GLEWVALISSGGSYTYYTDSVKGRFTISRDNSKNTLYVQMSSLR |
| | | | AEDTAVYYCSRHGGNFFDYWGQGTTVTVSS |
| SEQ ID NO: 3268 | VH | D- | EVQLVESGGGLVQPGGSLRLSCAVSGFTFRSYGMSWVRQAPGK |
| | | H.44 | GLEWVALISSGGSYTYYTDSVKGRFIISRDNSRNSLYLQKNRRR |
| | | | AEDMAVYYCSRHGGNFFDYWGQGTTVTVSS |
| SEQ ID NO: 3269 | VH | D- | EVQLVESGGGLVQPGGSLRLSCAVSGFTFRSYGMSWVHQAPGK |
| | | H.45 | GLEWVALISSGGSYTYYTDSVKGRFIISRDNSRNTLYLQTNSLRA |
| | | | EDTAVYYCSRHGGNFFDYWGQGTTVTVSS |
| SEQ ID NO: 3270 | VH | D- | EVHLVESGGGLVQPGGALRLSCAVSGFTFRSYGMSWVRQATGK |
| | | H.46 | GLEWVALISSGGSYTYYTDSVKGRFTISRENAKNSLYLQMNSLR |
| | | | AGDTAVYYCSRHGGNFFDYWGQGTTVTVSS |
| SEQ ID NO: 3271 | VH | D- | EVQLVESGGGLVQPRGSLRLSCAVSGFTFRSYGMSWVRQAPGK |
| | | H.47 | GLEWVALISSGGSYTYYTDSVKGRFTISRDNSKNTLYLQMNNLR |
| | | | AEGTAVYYCSRHGGNFFDYWGQGTTVTVSS |
| SEQ ID NO: 3272 | VH | D- | EVQLVESGGGLVQPRGSLRLSCAVSGFTFRSYGMSWVRQAPGK |
| | | H.48 | GLEWVALISSGGSYTYYTDSVKGRFTISRDNSKNTLYLQMNNLR |
| | | | AEGTAAYYCSRHGGNFFDYWGQGTTVTVSS |
| SEQ ID NO: 3273 | VH | D- | QVQLVQSGAEVKKPGASVKVSCKVSGFTFRSYGMSWVRQAPG |
| | | H.49 | KGLEWVALISSGGSYTYYTDSVKGRFTITRDNSTNTLYMELSSL |
| | | | RSEDTAVYYCSRHGGNFFDYWGQGTTVTVSS |
| SEQ ID NO: 3274 | VH | D- | QVQLVQSGSELKKPGASVKVSCKVSGFTFRSYGMSWVRQAPGQ |
| | | H.50 | GLEWVALISSGGSYTYYTDSVKGRFVISRDNSVNTLYLQISSLKA |
| | | | EDTAVYYCSRHGGNFFDYWGQGTTVTVSS |

TABLE 13
Amino acid sequences for additional anti-TCRβ V antibodies. Amino acid and nucleotide
sequences for murine and humanized antibody molecules which bind to various TCRVB families are
disclosed. The amino acid the heavy and light chain CDRs, and the amino acid and nucleotide
sequences of the heavy and light chain variable regions, and the heavy and light chains are
shown. Antibodies disclosed in the table include, MPB2D5, CAS1.1.3, IMMU222, REA 1062, and
JOVI-3. MPB2D5 binds human TCRβV 20-1 (TCRβV2 per old nomenclature). CAS1.1.3 binds human
TCRβV 27 (TCRβV 14 per old nomenclature). IMMU 222 binds human TCRβV 6-5, TCRβV 6-6, or TCRβV
6-9 (TCRβV13.1 per old nomenclature) REA1062 binds human TCRβV 5-1). JOVI-3 binds human
TCRβV 28 (TCRβV3.1 per old nomenclature). IMMU546 binds human TCRβV 2.
MPB2D5 (murine), also referred to here as BJ1188, BJ1190 and REA654; or Antibody G
Binds to human TCRVβ 20-1

| | | |
|---|---|---|
| SEQ ID NO: 1102 | HC CDR1 (Kabat) | SAYMH |
| SEQ ID NO: 1103 | HC CDR2 (Kabat) | RIDPATGKTKYAPKFQA |
| SEQ ID NO: 1104 | HC CDR3 (Kabat) | SLNWDYGLDY |
| SEQ ID NO: 1105 | HC CDR1 (Chothia) | GFNIKSA |
| SEQ ID NO: 1106 | HC CDR2 (Chothia) | DPATGK |
| SEQ ID NO: 1104 | HC CDR3 (Chothia) | SLNWDYGLDY |
| SEQ ID NO: 3640 | HC CDR1 (Combined) | GFNIKSAYMH |
| SEQ ID NO: 1103 | HC CDR2 (Combined) | RIDPATGKTKYAPKFQA |
| SEQ ID NO: 1104 | HC CDR3 (Combined) | SLNWDYGLDY |
| SEQ ID NO: 1107 | LC CDR1 (Kabat) | RASKSVSILGTHLIH |
| SEQ ID NO: 1108 | LC CDR2 (Kabat) | AASNLES |
| SEQ ID NO: 1109 | LC CDR3 (Kabat) | QQSIEDPWT |
| SEQ ID NO: 1110 | LC CDR1 (Chothia) | SKSVSILGTHL |
| SEQ ID NO: 1108 | LC CDR2 (Chothia) | AASNLES |
| SEQ ID NO: 1109 | LC CDR3 (Chothia) | QQSIEDPWT |
| SEQ ID NO: 1107 | LC CDR1 (Combined) | RASKSVSILGTHLIH |
| SEQ ID NO: 1108 | LC CDR2 (Combined) | AASNLES |
| SEQ ID NO: 1109 | LC CDR3 (Combined) | QQSIEDPWT |
| SEQ ID NO: 1111 | VL | DIVLTQSPASLAVSLGQRATISCRASKSVSILGTHLIHWYQQKP |
| | | GQPPKLLIYAASNLESGVPARFSGSGSETVFTLNIHPVEEEDAA |
| | | TYFCQQSIEDPWTFGGGTKLGIK |
| SEQ ID NO: 1112 | VH | EVQLQQSVADLVRPGASLKLSCTASGFNIKSÅYMHWVIQRPD |
| | | QGPECLGRIDPATGKTKYAPKFQAKATITADTSSNTAYLQLSS |
| | | LTSEDTAIYYCTRSLNWDYGLDYWGQGTSVTVSS |

VH for MPB2D5 (humanized) also referred to as Antibody G-H (humanized)
Binds to human TCRVβ 20-1

| | | |
|---|---|---|
| SEQ ID NO: 1113 | VH-1 | QVQLVQSGAEVKKPGASVKVSCKASGFNIKSAYMHWVRQAP |
| | | GQGLEWMGRIDPATGKTKYAPKFQARVTMTADTSTNTAYME |
| | | LSSLRSEDTAVYYCARSLNWDYGLDYWGQGTLVTVSS |
| SEQ ID NO: 1114 | VH-2 | QVQLVQSGAEVKKPGASVKVSCKASGFNIKSAYMHWVRQAP |
| | | GQEPGCMGRIDPATGKTKYAPKFQARVTMTADTSINTAYTEL |
| | | SSLRSEDTATYYCARSLNWDYGLDYWGQGTLVTVSS |
| SEQ ID NO: 1115 | VH-3 | QVQLVQSGAEVKKPGSSVKVSCKASGFNIKSAYMHWVRQAP |
| | | GQGLEWMGRIDPATGKTKYAPKFQARVTITADTSTNTAYMEL |
| | | SSLRSEDTAVYYCARSLNWDYGLDYWGQGTLVTVSS |
| SEQ ID NO: 1116 | VH-4 | QVQLVQSGAEVKKPGASVKVSCKASGFNIKSAYMHWVRQAP |
| | | GQRLEWMGRIDPATGKTKYAPKFQARVTITADTSANTAYMEL |
| | | SSLRSEDTAVYYCARSLNWDYGLDYWGQGTLVTVSS |

VL for MPB2D5 (humanized) also referred to as Antibody G-H (humanized)
Binds to human TCRVβ 20-1

| | | |
|---|---|---|
| SEQ ID NO: 1117 | VL-1 | EIVLTQSPATLSLSPGERATLSCRASKSVSILGTHLIHWYQQKP |
| | | GQAPRLLIYAASNLESGIPARFSGSGSETDFTLTISSLEPEDFAV |
| | | YFCQQSIEDPFGGGTKVEIK |
| SEQ ID NO: 1118 | VL-2 | EIVLTQSPATLSLSPGERATLSCRASKSVSILGTHLIHWYQQKP |
| | | GLAPRLLIYAASNLESGIPDRESGSGSETDFTLTISRLEPEDFAV |
| | | YFCQQSIEDPFGGGTKVEIK |
| SEQ ID NO: 1119 | VL-3 | EIVLTQSPGTLSLSPGERATLSCRASKSVSILGTHLIHWYQQKP |
| | | GQAPRLLIYAASNLESGIPDRFSGSGSETDFTLTISRLEPEDFAV |
| | | YFCQQSIEDPFGGGTKVEIK |

CAS1.1.3 (murine) also referred to herein as BJ1460; or Antibody H
Binds to human TCRVβ 27

| | | |
|---|---|---|
| SEQ ID NO: 1120 | HC CDR1 (Kabat) | DTYMY |
| SEQ ID NO: 1121 | HC CDR2 (Kabat) | RIDPANGNTKYDPKFQD |
| SEQ ID NO: 1122 | HC CDR3 (Kabat) | GSYYYAMDY |
| SEQ ID NO: 1123 | HC CDR1 (Chothia) | GFKTEDT |
| SEQ ID NO: 1124 | HC CDR2 (Chothia) | DPANGN |
| SEQ ID NO: 1122 | HC CDR3 (Chothia) | GSYYYAMDY |
| SEQ ID NO: 1125 | HC CDR1 (Combined) | GFKTEDTYMY |
| SEQ ID NO: 1121 | HC CDR2 (Combined) | RIDPANGNTKYDPKFQD |
| SEQ ID NO: 1122 | HC CDR3 (Combined) | GSYYYAMDY |
| SEQ ID NO: 1126 | LC CDR1 (Kabat) | RASESVDSYGNSFMH |
| SEQ ID NO: 1127 | LC CDR2 (Kabat) | RASNLES |
| SEQ ID NO: 1128 | LC CDR3 (Kabat) | QQSNEDPYT |
| SEQ ID NO: 3641 | LC CDR1 (Chothia) | SESVDSYGNSF |
| SEQ ID NO: 1127 | LC CDR2 (Chothia) | RASNLES |
| SEQ ID NO: 1128 | LC CDR3 (Chothia) | QQSNEDPYT |
| SEQ ID NO: 1126 | LC CDR1 (Combined) | RASESVDSYGNSFMH |
| SEQ ID NO: 1127 | LC CDR2 (Combined) | RASNLES |
| SEQ ID NO: 1128 | LC CDR3 (Combined) | QQSNEDPYT |
| SEQ ID NO: 1129 | VL | DIVLTQSPASLAVSLGQRATISCRASESVDSYGNSFMHWYQQK |
| | | PGQPPKLLIYRASNLESGIPARFSGSGSRTDFTLTINPVEADDVA |
| | | TYYCQQSNEDPYTFGGGTKLEIK |
| SEQ ID NO: 1130 | VH | EVQLQQSGAELVKPGASVKLSCTASGFKTEDTYMYWVKQRP |
| | | EQGLEWIGRIDPANGNTKYDPKFQDKATITADSSSNTAYLQLS |
| | | ISLPSEDTAVYYCARGSYYYAMDYWGQGTSVTVSS |

VH for CAS1.1.3 (humanized) also referred to as Antibody H-H (humanized)
Binds to human TCRVβ 27

| | | |
|---|---|---|
| SEQ ID NO: 1131 | VH-1 | QVQLVQSGAEVKKPGSSVKVSCKASGFKTEDTYMYWVRQAP |
| | | GQGLEWIGRIDPANGNTKYDPKFQDRATITADSSTNTAYMELS |
| | | SLRSEDTAVYYCARGSYYYAMDYWGQGTLVTVSS |
| SEQ ID NO: 1132 | VH-2 | QVQLVQSGAEVKKPGASVKVSCKASGFKTEDTYMYWVRQAP |
| | | GQRLEWIGRIDPANGNTKYDPKFQDRATITADSSANTAYMELS |
| | | SLRSEDTAVYYCARGSYYYAMDYWGQGTLVTVSS |
| SEQ ID NO: 1133 | VH-3 | EVQLVESGGGLVQPGGSLKLSCAASGFKTEDTYMYWVRQAS |
| | | GKGLEWIGRIDPANGNTKYDPKFQDRATISADSSKNTAYLQM |
| | | NSLKTEDTAVYYCARGSYYYAMDYWGQGTLVTVSS |
| SEQ ID NO: 1134 | VH-4 | EVQLVQSGAEVKKPGESLRISCKASGFKTEDTYMYWVRQMPG |
| | | KGLEWIGRIDPANGNTKYDPKFQDQATISADSSINTAYLQWSS |
| | | LKASDTAMYYCARGSYYYAMDYWGQGTLVTVSS |
| SEQ ID NO: 1135 | VH-5 | QVQLVQSGSELKKPGASVKVSCKASGFKTEDTYMYWVRQAP |
| | | GQGLEWIGRIDPANGNTKYDPKFQDRAVISADSSVNTAYLQIS |
| | | SLKAEDTAVYYCARGSYYYAMDYWGQGTLVTVSS |

VL for CAS1.1.3 (humanized) also referred to as Antibody H-H (humanized)
Binds to human TCRVβ 27

| | | |
|---|---|---|
| SEQ ID NO: 1136 | VL-1 | DIVLTQSPDSLAVSLGERATINCRASESVDSYGNSFMHWYQQK |
| | | PGQPPKLLIYRASNLESGVPDRFSGSGSRTDFTLTISSLQAEDVA |
| | | VYYCQQSNEDPYTFGQGTKLEIK |
| SEQ ID NO: 1137 | VL-2 | EIVLTQSPATLSLSPGERATLSCRASESVDSYGNSFMHWYQQK |
| | | PGQAPKLLIYRASNLESGIPARFSGSGSRTDFTLTISRLEPEDFA |
| | | VYYCQQSNEDPYTFGQGTKLEIK |
| SEQ ID NO: 1138 | VL-3 | DIQLTQSPSSLSASVGDRVTITCRASESVDSYGNSFMHWYQQK |
| | | PGQAPKLLIYRASNLESGVPSRFSGSGSRTDFTLTISSLQPEDVA |
| | | TYYCQQSNEDPYTFGQGTKLEIK |
| SEQ ID NO: 1139 | VL-4 | AIQLTQSPSSLSASVGDRVTITCRASESVDSYGNSFMHWYQQK |
| | | PGKAPKLLIYRASNLESGVPSRFSGSGSRTDFTLTISSLQPEDFA |
| | | TYYCQQSNEDPYTFGQGTKLEIK |
| SEQ ID NO: 1140 | VL-5 | EIVLTQSPDFQSVTPKEKVTITCRASESVDSYGNSFMHWYQQK |
| | | PDQSPKLLIYRASNLESGVPSRFSGSGSRTDFTLTINSLEAEDAA |
| | | TYYCQQSNEDPYTFGQGTKLEIK |

IMMU222 (marine) also referred to as BJ1461; or Antibody I
Binds to human TCRVβ 6-5, 6-6, 6-9

| | | |
|---|---|---|
| SEQ ID NO: 1141 | HC CDR1 (Kabat) | SYAMS |
| SEQ ID NO: 1142 | HC CDR2 (Kabat) | HISNGGDYIYYADTVKG |
| SEQ ID NO: 1143 | HC CDR3 (Kabat) | PSYYSDPWFFDV |
| SEQ ID NO: 1144 | HC CDR1 (Chothia) | GFTFRSY |
| SEQ ID NO: 1145 | HC CDR2 (Chothia) | SNGGDY |
| SEQ ID NO: 1143 | HC CDR3 (Chothia) | PSYYSDPWFFDV |
| SEQ ID NO: 1146 | HC CDR1 (Combined) | GFTFRSYAMS |
| SEQ ID NO: 1142 | HC CDR2 (Combined) | HISNGGDYIYYADTVKG |
| SEQ ID NO: 1143 | HC CDR3 (Combined) | PSYYSDPWFFDV |
| SEQ ID NO: 1147 | LC CDR1 (Kabat) | SAGSSVSFMH |
| SEQ ID NO: 1148 | LC CDR2 (Kabat) | DTSKLAS |
| SEQ ID NO: 1149 | LC CDR3 (Kabat) | LQGSGFPLT |
| SEQ ID NO: 1150 | LC CDR1 (Chothia) | GSSVSF |
| SEQ ID NO: 1148 | LC CDR2 (Chothia) | DTSKLAS |
| SEQ ID NO: 1149 | LC CDR3 (Chothia) | LQGSGFPLT |
| SEQ ID NO: 1147 | LC CDR1 (Combined) | SAGSSVSFMH |
| SEQ ID NO: 1148 | LC CDR2 (Combined) | DTSKLAS |
| SEQ ID NO: 1149 | LC CDR3 (Combined) | LQGSGFPLT |
| SEQ ID NO: 1151 | VL | ENVLTQSPAIMSASPGEKVTMTCSAGSSVSFMHWYQQKSSTSP |
| | | KLWIYDTSKLASGVPGRFSGSGSGNSFSLTISSMEAEDVAIYYC |
| | | LQGSGFPLTFGSGTKLEIK |
| SEQ ID NO: 1152 | VH | DVKLVESGEGLVKPGGSLKLSCAASGFTFRSYAMSWVRQTPE |
| | | KRLEWVAHISNGGDYIYYADTVKGRFTISRDNARNTLYLQMS |
| | | SLKSEDTAMYYCTRPSYYSDPWFFDVWGTGTTVTVSS |

VH for IMMU222 (humanized) also referred to as Antibody I-H
Binds to human TCRVβ 6-5, 6-6, 6-9

| | | |
|---|---|---|
| SEQ ID NO: 1153 | VH-1 | EVQLVESGGGLVQPGGSLRLSCAASGFTFRSYAMSWVRQAPG |
| | | KGLEWVAHISNGGDYIYYADTVKGRFTISRDNAKNSLYLQMN |
| | | SLRAEDTAVYYCTRPSYYSDPWFFDVWGQGTTVTVSS |
| SEQ ID NO: 1154 | VH-2 | QVQLVESGGGVVQPGRSLRLSCAASGFTFRSYAMSWVRQAPG |
| | | KGLEWVAHISNGGDYIYYADTVKGRFTISRDNSKNTLYLQMS |
| | | SLRAEDTAVYYCTRPSYYSDPWFFDVWGQGTTVTVSS |
| SEQ ID NO: 1155 | VH-3 | EVQLVESGGGLVQPGGSLRLSCAASGFTFRSYAMSWVRQAPG |
| | | KGLEWVAHISNGGDYIYYADTVKGRFTISRDNSKNTLYLQMN |
| | | SLRAEDTAVYYCTRPSYYSDPWFFDVWGQGTTVTVSS |
| SEQ ID NO: 1156 | VH-4 | QVQLVQSGSELKKPGASVKVSCKASQFTFRSYAMSWVRQAPG |
| | | QGLEWVAHISNGGDYIYYADTVKGRFVISRDNSVNTLYLQISS |
| | | LKAEDTAVYYCTRPSYYSDPWFFDVWGQGTTVTVSS |
| SEQ ID NO: 1157 | VH-5 | QVQLVQSGAEVKKPGASVKVSCKASGFTFRSYAMSWVRQAP |
| | | GQRLEWVAHISNGGDYIYYADTVKGRFTITRDNSANTLYMEL |
| | | SSLRSEDTAVYYCTRPSYYSDPWFFDVWGQGTTVTVSS |

VL for IMMU222 (humanized)) also referred to as Antibody I-H
Binds to human TCRVβ 6-5, 6-6, 6-9

| | | |
|---|---|---|
| SEQ ID NO: 1158 | VL-1 | ENVLTQSPATLSLSPGERATLSCSAGSSVSFMHWYQQKPGQAP |
| | | KLLIYDTSKLASGIPARFSGSGSGNDFTLTISSLEPEDFAVYYCL |
| | | QGSGFPLTFGQGTKLEIK |
| SEQ ID NO: 1159 | VL-2 | ENVLTQSPDFQSVTPKEKVTITCSAGSSVSFMHWYQQKPDQSP |
| | | KLLIYDTSKLASGVPSRFSGSGSGNDFTLTINSLEAEDAATYYC |
| | | LQGSGFPLTFGQGTKLEIK |
| SEQ ID NO: 1160 | VL-3 | DNQLTQSPSSLSASVGDRVTITCSAGSSVSFMHWYQQKPGKVP |
| | | KLLIYDTSKLASGVPSRFSGSGSGNDFTLTISSLQPEDVATYYC |
| | | LQGSGFPLTFGQGTKLEIK |
| SEQ ID NO: 1161 | VL-4 | ANQLTQSPSSLSASVGDRVTITCSAGSSVSFMHWYQQKPGKAP |
| | | KLLIYDTSKLASGVPSRFSGSGSGNDFTLTISSLQPEDFATYYCL |
| | | QGSGFPLTFGQGTKLEIK |
| SEQ ID NO: 1162 | VL-5 | DNVLTQSPDSLAVSLGERATINCSAGSSVSFMHWYQQKPGQPP |
| | | KLLIYDTSKLASGVPDRFSGSGSGNDFTLTISSLQAEDVAVYYC |
| | | LQGSGFPLTFGQGTKLEIK |

REA1062 (murine), also referred to as BJ1189 or as Antibody J
Binds to human TCRVβ 5-1

| | | |
|---|---|---|
| SEQ ID NO: 1163 | HC CDR1 (Kabat) | DYNIH |
| SEQ ID NO: 1164 | HC CDR2 (Kabat) | YINPYNGRTGYNQKFKA |
| SEQ ID NO: 1165 | HC CDR3 (Kabat) | WDGSSYFDY |
| SEQ ID NO: 1166 | HC CDR1 (Chothia) | GYTFTDYNIH |
| SEQ ID NO: 1167 | HC CDR2 (Chothia) | NPYNGR |
| SEQ ID NO: 1165 | HC CDR3 (Chothia) | WDGSSYFDY |
| SEQ ID NO: 1166 | HC CDR1 (Combined) | GYTFTDYNIH |
| SEQ ID NO: 1164 | HC CDR2 (Combined) | YINPYNGRTGYNQKFKA |
| SEQ ID NO: 1165 | HC CDR3 (Combined) | WDGSSYFDY |
| SEQ ID NO: 1168 | LC CDR1 (Kabat) | SASSSVSYMH |
| SEQ ID NO: 1169 | LC CDR2 (Kabat) | EISKLAS |
| SEQ ID NO: 1170 | LC CDR3 (Kabat) | QQWNYPLLT |
| SEQ ID NO: 1297 | LC CDR1 (Chothia) | SSSVSY |
| SEQ ID NO: 1169 | LC CDR2 (Chothia) | EISKLAS |
| SEQ ID NO: 1170 | LC CDR3 (Chothia) | QQWNYPLLT |
| SEQ ID NO: 1168 | LC CDR1 (Combined) | ISASSSVSYMH |
| SEQ ID NO: 1169 | LC CDR2 (Combined) | EISKLAS |
| SEQ ID NO: 1170 | LC CDR3 (Combined) | QQWNYPLLT |
| SEQ ID NO: 1171 | VL | EIVLTQSPAITAASLGQKVTITCSASSSVSYMHWYQQKSGTSPK |
| | | PWIYEISKLASGVPARFSGSGSGTSYSLTISSMEAEDAAIYYCQ |
| | | QWNYPLLTFGAGTKLELK |
| SEQ ID NO: 1172 | VH | EVQLQQSGPVLVKPGASVRMSCKASGYTFTDYNIHWVKQSH |
| | | GRSLEWVGYINPYNGRTGYNQKFKAKATLTVDKSSSTAYMD |
| | | LRSLTSEDSAVYYCARWDGSSYFDYWGQGTTLTVSS |

VH for REA1062 (humanized) also referred to as Antibody J-H
Binds to human TCRVβ 5-1

| | | |
|---|---|---|
| SEQ ID NO: 1173 | VH-1 | QVQLVQSGAEVKKPGSSVKVSCKASGYTFTDYNIHWVRQAPG |
| | | QGLEWVGYINPYNGRTGYNQKFKARATLTVDKSTSTAYMELS |
| | | SLRSEDTAVYYCARWDGSSYFDYWGQGTTVTVSS |
| SEQ ID NO: 1174 | VH-2 | QVQLVQSGAEVKKPGASVKVSCKASGYTFTDYNIHWVRQAP |
| | | GQGLEWVGYINPYNGRTGYNQKFKARATLTVDKSTSTAYME |
| | | LRSLRSDDMAVYYCARWDGSSYFDYWGQGTTVTVSS |
| SEQ ID NO: 1175 | VH-3 | QVQLVQSGAEVKKPGASVKVSCKASGYTFTDYNIHWVRQAT |
| | | GQGLEWVGYINPYNQRTGYNQKFKARATLTVNKSISTAYMEL |
| | | SSLRSEDTAVYYCARWDGSSYFDYWGQGTTVTVSS |
| SEQ ID NO: 1176 | VH-4 | EVQLVESGGGLVQPGRSLRLSCTASGYTFTDYNIHWVRQAPG |
| | | KGLEWVGYINPYNGRTGYNQKFKARATLSVDKSKSIAYLQM |
| | | NSLKTEDTAVYYCARWDGSSYFDYWGQGTTVTVSS |
| SEQ ID NO: 1177 | VH-5 | QVQLVQSGSELKKPGASVKVSCKASGYTFTDYNIHWVRQAPG |
| | | QGLEWVGYINPYNGRTGYNQKFKARAVLSVDKSVSTAYLQIS |
| | | SLKAEDTAVYYCARWDGSSYFDYWGQGTTVTVSS |

VL for REA1062 (humanized) also referred to as Antibody J-H
Binds to human TCRVβ 5-1

| | | |
|---|---|---|
| SEQ ID NO: 1178 | VL-1 | EIVLTQSPATLSLSPGERATLSCSASSSVSYMHWYQQKPGQAP |
| | | KLLIYEISKLASGIPARFSGSGSGTDYTLTISSLEPEDFAVYYCQ |
| | | QWNYPLLTFGQGTKLEIK |
| SEQ ID NO: 1179 | VL-2 | EIVLTQSPATLSLSPGERATLSCSASSSVSYMHWYQQKPGQAP |
| | | KLLIYEISKLASGIPARFSGSGSGTDYTLTISRLEPEDFAVYYCQ |
| | | QWNYPLLTFGQGTKLEIK |
| SEQ ID NO: 1180 | VL-3 | EIVLTQSPDFQSVTPKEKVTITCSASSSVSYMHWYQQKPDQSP |
| | | KLLIYEISKLASGVPSRFSGSGSGTDYTLTINSLEAEDAATYYC |
| | | QQWNYPLLTFGQGTKLEIK |
| SEQ ID NO: 1181 | VL-4 | DIQLTQSPSFLSASVGDRVTITCSASSSVSYMHWYQQKPGKAP |
| | | KLLIYEISKLASGVPSRFSGSGSGTEYTLTISSLQPEDFATYYCQ |
| | | QWNYPLLTFGQGTKLEIK |
| SEQ ID NO: 1182 | VL-5 | AIQLTQSPSSLSASVGDRVTITCSASSSVSYMHWYQQKPGKAP |
| | | KLLIYEISKLASGVPSRFSGSGSGTDYTLTISSLQPEDFATYYCQ |
| | | QWNYPLLTFGQGTKLEIK |
| SEQ ID NO: 1183 | VL-6 | AIRLTQSPFSLSASVGDRVTITCSASSSVSYMHWYQQKPAKAP |
| | | KLFIYEISKLASGVPSRFSGSGSGTDYTLTISSLQPEDFATYYCQ |
| | | QWNYPLLTFGQGTKLEIK |
| SEQ ID NO: 1184 | VL-7 | DIVLTQSPDSLAVSLGERATINCSASSSVSYMHWYQQKPGQPP |
| | | KLLIYEISKLASGVPDRFSGSGSGTDYTLTISSLQAEDVAVYYC |
| | | QQWNYPLLTFGQGTKLEIK |

JOVI-3 (murine), also referred to as BJ1187 or Antibody K
Binds to human TCRVβ 28

| | | |
|---|---|---|
| SEQ ID NO: 1185 | HC CDR1 (Kabat) | GSWMN |
| SEQ ID NO: 1186 | HC CDR2 (Kabat) | RIYPGDGDTDYSGKFKG |
| SEQ ID NO: 1187 | HC CDR3 (Kabat) | SGYFNYVPVFDY |
| SEQ ID NO: 1188 | HC CDR1 (Chothia) | GYTFSGS |
| SEQ ID NO: 1189 | HC CDR2 (Chothia) | YPGDGD |
| SEQ ID NO: 1187 | HC CDR3 (Chothia) | SGYFNYVPVFDY |
| SEQ ID NO: 1190 | HC CDR1 (Combined) | GYTFSGSWMN |
| SEQ ID NO: 1186 | HC CDR2 (Combined) | RIYPGDGDTDYSGKFKG |
| SEQ ID NO: 1187 | HC CDR3 (Combined) | SGYFNYVPVFDY |
| SEQ ID NO: 1191 | LC CDR1 (Kabat) | SANSTVGYIH |
| SEQ ID NO: 1192 | LC CDR2 (Kabat) | TTSNLAS |
| SEQ ID NO: 1193 | LC CDR3 (Kabat) | HQWSFYPT |
| SEQ ID NO: 1194 | LC CDR1 (Chothia) | NSTVGY |
| SEQ ID NO: 1192 | LC CDR2 (Chothia) | TTSNLAS |
| SEQ ID NO: 1193 | LC CDR3 (Chothia) | HQWSFYPT |
| SEQ ID NO: 1191 | LC CDR1 (Combined) | ISANSTVQYIH |
| SEQ ID NO: 1192 | LC CDR2 (Combined) | TTSNLAS |
| SEQ ID NO: 1193 | LC CDR3 (Combined) | HQWSFYPT |
| SEQ ID NO: 1195 | VL | QIVLTQSPAIMSASLGEEIALTCSANSTVQYIHWYQQKSGTSPK |
| | | LLIYTTSNLASGVPSRFSGSGSGTFYSLTISSVEAEDAADYFCH |
| | | QWSFYPTFGGGTKLEIK |
| SEQ ID NO: 1196 | VH | QIQLQQSGPEVVKPGASVQISCKASGYTFSGSWMNWVKQRPG |
| | | KGLEWIGRIYPGDGDTDYSGKFKGRATLTADKSSSTAYMRLSS |
| | | LTSEDSAVYFCARSGYFNYVPVFDYWGQGTTLSVSS |

VH for JOVI-3 (humanized) also referred to as Antibody K-H
Binds to human TCRVβ 28

| | | |
|---|---|---|
| SEQ ID NO: 1197 | VH-1 | QIQLVQSGAEVKKPGASVKVSCKASGYTFSGSWMNWVRQAP |
| | | GQGLEWIGRIYPGDGDTDYSGKFKGRATLTADKSTSTAYMEL |
| | | SSLRSEDTAVYYCARSGYFNYVPVFDYWGQGTTVTVSS |
| SEQ ID NO: 1198 | VH-2 | QIQLVQSGAEVKKPGSSVKVSCKASGYTFSGSWMNWVRQAP |
| | | GQGLEWIGRIYPGDGDTDYSGKFKGRATLTADKSTSTAYMEL |
| | | SSLRSEDTAVYYCARSGYFNYVPVFDYWGQGTTVTVSS |
| SEQ ID NO: 1199 | VH-3 | EIQLVQSGAEVKKPGESLKISCKASGYTFSGSWMNWVRQMPG |
| | | KGLEWIGRIYPGDGDTDYSGKFKGQATLSADKSISTAYLQWSS |
| | | LKASDTAMYYCARSGYFNYVPVFDYWGQGTTVTVSS |
| SEQ ID NO: 1200 | VH-4 | QIQLVQSGSELKKPGASVKVSCKASGYTFSGSWMNWVRQAP |
| | | GQGLEWIGRIYPGDGDTDYSGKFKGRAVLSADKSVSTAYLQIS |
| | | SLKAEDTAVYYCARSGYFNYVPVFDYWGQGTTVTVSS |
| SEQ ID NO: 1201 | VH-5 | QIQLVQSGSELKKPGASVKVSCKASGYTFSGSWMNWVRQAP |
| | | GQGLEWIGRIYPGDGDTDYSGKFKGRAVLSADKSVSMAYLQI |
| | | SSLKAEDTAVYYCARSGYFNYVPVFDYWGQGTTVTVSS |
| SEQ ID NO: 1202 | VH-6 | EIQLVESGGGLVQPGRSLRLSCTASGYTFSGSWMNWVRQAPG |
| | | KGLEWIGRIYPGDGDTDYSGKFKGRATLSADKSKSIAYLQMN |
| | | SLKTEDTAVYYCARSGYFNYVPVFDYWGQGTTVTVSS |

VL for JOVI-3 (humanized) also referred to as Antibody K-H
Binds to human TCRVβ 28

| | | |
|---|---|---|
| SEQ ID NO: 1203 | VL-1 | EIVLTQSPATLSLSPGERATLSCSANSTVGYIHWYQQKPGQAP |
| | | KLLIYTTSNLASGIPARFSGSGSGTDYTLTISSLEPEDFAVYFCH |
| | | QWSFYPTFGQGTKLEIK |
| SEQ ID NO: 1204 | VL-2 | DIQLTQSPSFLSASVGDRVTITCSANSTVGYIHWYQQKPGKAP |
| | | KLLIYTTSNLASGVPSRFSGSGSGTEYTLTISSLQPEDFATYFCH |
| | | QWSFYPTFGQGTKLEIK |
| SEQ ID NO: 1205 | VL-3 | EIVLTQSPATLSLSPGERATLSCSANSTVGYIHWYQQKPGQAP |
| | | KLLIYTTSNLASGIPARFSGSGPGTDYTLTISSLEPEDFAVYFCH |
| | | QWSFYPTFGQGTKLEIK |
| SEQ ID NO: 1206 | VL-4 | DIVLTQSPDSLAVSLGERATINCSANSTVGYIHWYQQKPGQPP |
| | | KLLIYTTSNLASGVPDRFSGSGSGTDYTLTISSLQAEDVAVYFC |
| | | HQWSFYPTFGQGTKLEIK |
| SEQ ID NO: 1207 | IVL-5 | EIVLTQSPDFQSVTPKEKVTITCSANSTVGYIHWYQQKPDQSPK |
| | | LLIYTTSNLASGVPSRFSGSGSGTDYTLTINSLEAEDAATYFCH |
| | | QWSFYPTFGQGTKLEIK |

ZOE (marine), also referred to as BJ1538 or as Antibody L
Binds to human TCRVβ 4-1, 4-2, 4-3

| | | |
|---|---|---|
| SEQ ID NO: 1208 | HC CDR1 (Kabat) | DYYMY |
| SEQ ID NO: 1209 | HC CDR2 (Kabat) | TISGGGSYTYSPDSVKG |
| SEQ ID NO: 1210 | HC CDR3 (Kabat) | ERDIYYGNFNAMVY |
| SEQ ID NO: 1211 | HC CDR1 (Chothia) | GFTFSDY |
| SEQ ID NO: 1212 | HC CDR2 (Chothia) | SGGGSY |
| SEQ ID NO: 1210 | HC CDR3 (Chothia) | ERDIYYGNFNAMVY |
| SEQ ID NO: 1213 | HC CDR1 (Combined) | GFTFSDYYMY |
| SEQ ID NO: 1209 | HC CDR2 (Combined) | TISGGGSYTYSPDSVKG |
| SEQ ID NO: 1210 | HC CDR3 (Combined) | ERDIYYGNFNAMVY |
| SEQ ID NO: 1214 | LC CDR1 (Kabat) | RASKSVSTSGYSYMH |
| SEQ ID NO: 1215 | LC CDR2 (Kabat) | LASNLES |
| SEQ ID NO: 1216 | LC CDR3 (Kabat) | QHSRDLPWT |
| SEQ ID NO: 1217 | LC CDR1 (Chothia) | SKSVSTSQYSY |
| SEQ ID NO: 1215 | LC CDR2 (Chothia) | LASNLES |
| SEQ ID NO: 1216 | LC CDR3 (Chothia) | QHSRDLPWT |
| SEQ ID NO: 1214 | LC CDR1 (Combined) | RASKSVSTSGYSYMH |
| SEQ ID NO: 1215 | LC CDR2 (Combined) | LASNLES |
| SEQ ID NO: 1216 | LC CDR3 (Combined) | QHSRDLPWT |
| SEQ ID NO: 1218 | VL | DIVLTQSPVSLTVSLGQRATISCRASKSVSTSGYSYMHWYQQK |
| | | PGQPPKLLIYLASNLESGVPARFSGSGSGTDFTLNIHPVEEEDA |
| | | ATYYCQHSRDLPWTFGGGTKLEIK |
| SEQ ID NO: 1219 | VH | EVQLVESGGGLVKPGGSLKLSCAASGFTFSDYYMYWVRQTPE |
| | | KRLEWVATISGGGSYTYSPDSVKGRFTISRDNAKNNLYLOMSS |
| | | LRSEDTAMYFCARERDIYYGNFNAMVYWGRGTSVTVSS |

VH for ZOE (humanized) also referred to as Antibody L-H
Binds to human TCRVβ 4-1, 4-2, 4-3

| | | |
|---|---|---|
| SEQ ID NO: 1220 | VH-1 | EVQLLESGGGLVQPGGSLRLSCAASGFTFSDYYMYWVRQAPG |
| | | KGLEWVATISGGGSYTYSPDSVKGRFTISRDNSKNTLYLQMNS |
| | | LRAEDTAVYYCARERDIYYGNFNAMVYWGRGTLVTVSS |
| SEQ ID NO: 1221 | VH-2 | EVQLVESGGGLVQPGGSLRLSCAASGFTFSDYYMYWVRQAPG |
| | | KGLEWVATISGGGSYTYSPDSVKGRFTISRDNAKNSLYLQMNS |
| | | LRAEDTAVYYCARERDIYYGNFNAMVYWGRGTLVTVSS |
| SEQ ID NO: 1222 | VH-3 | QVQLVESGGGVVQPGRSLRLSCAASGFTFSDYYMYWVRQAP |
| | | GKGLEWVATISGGGSYTYSPDSVKGRFTISRDNSKNTLYLQM |
| | | NSLRAEDTAVYYCARERDIYYGNFNAMVYWGRGTLVTVSS |
| SEQ ID NO: 1223 | VH-4 | QVQLVESGGGLVKPGGSLRLSCAASGFTFSDYYMYWIRQAPG |
| | | KGLEWVATISGGGSYTYSPDSVKGRFTISRDNAKNSLYLQMNS |
| | | LRAEDTAVYYCARERDIYYGNFNAMVYWGRGTLVTVSS |

VL for ZOE (humanized) also referred to as Antibody L-H
Binds to human TCRVβ 4-1, 4-2, 4-3

| | | |
|---|---|---|
| SEQ ID NO: 1224 | VL-1 | EIVLTQSPGTLSLSPGERATLSCRASKSVSTSGYSYMHWYQQK |
| | | PGQAPRLLIYLASNLESGIPDRFSGSGSGTDFTLTISRLEPEDFA |
| | | VYYCQHSRDLPWTFGGGTKVEIK |
| SEQ ID NO: 1225 | VL-2 | EIVLTQSPATLSLSPGERATLSCRASKSVSTSGYSYMHWYQQK |
| | | PGQAPRLLIYLASNLESGIPARFSGSGSGTDFTLTISSLEPEDFAV |
| | | YYCQHSRDLPWTFGGGTKVEIK |
| SEQ ID NO: 1226 | VL-3 | DIQLTQSPSTLSASVGDRVTITCRASKSVSTSGYSYMHWYQQK |
| | | PGKAPKLLIYLASNLESGVPSRFSGSGSGTEFTLTISSLQPDDFA |
| | | TYYCQHSRDLPWTFGGGTKVEIK |
| SEQ ID NO: 1227 | VL-4 | AIQLTQSPSSLSASVGDRVTITCRASKSVSTSGYSYMHWYQQK |
| | | PGKAPKLLIYLASNLESGVPSRFSGSGSGTDFTLTISSLQPEDFA |
| | | TYYCQHSRDLPWTFGGGTKVEIK |

Anti-TCRvb19 (murine), also referred to as BJ1465; or Antibody M
Binds to human TCRVβ 19

| | | |
|---|---|---|
| SEQ ID NO: 1229 | HC CDR1 (Kabat) | GYFWN |
| SEQ ID NO: 1230 | HC CDR2 (Kabat) | YISYDGSNNYNPSLKN |
| SEQ ID NO: 1231 | HC CDR3 (Kabat) | PSPGTGYAVDY |
| SEQ ID NO: 1232 | HC CDR1 (Chothia) | GYSITSGY |
| SEQ ID NO: 1233 | HC CDR2 (Chothia) | SYDGSN |
| SEQ ID NO: 1231 | HC CDR3 (Chothia) | PSPGTGYAVDY |
| SEQ ID NO: 1234 | HC CDR1 (Combined) | GYSITSGYFWN |
| SEQ ID NO: 1230 | HC CDR2 (Combined) | YISYDGSNNYNPSLKN |
| SEQ ID NO: 1231 | HC CDR3 (Combined) | PSPGTGYAVDY |
| SEQ ID NO: 1235 | LC CDR1 (Kabat) | RSSQSLVHSNGNTYLH |
| SEQ ID NO: 1236 | LC CDR2 (Kabat) | KVSNRFS |
| SEQ ID NO: 1237 | LC CDR3 (Kabat) | SQSTHVPFT |
| SEQ ID NO: 1238 | LC CDR1 (Chothia) | SQSLVHSNGNTY |
| SEQ ID NO: 1236 | LC CDR2 (Chothia) | KVSNRFS |
| SEQ ID NO: 1237 | LC CDR3 (Chothia) | SQSTHVPFT |
| SEQ ID NO: 1235 | LC CDR1 (Combined) | RSSQSLVHSNGNTYLH |
| SEQ ID NO: 1236 | LC CDR2 (Combined) | KVSNRFS |
| SEQ ID NO: 1237 | LC CDR3 (Combined) | SQSTHVPFT |
| SEQ ID NO: 1239 | VL | NVVMTQTPLSLPVSLGDQASISCRSSQSLVHSNGNTYLHWYLQ |
| | | KPGQSPKFLIYKVSNRFSGVPDRFSGGGSGTEFTLKISRVEAED |
| | | LGVYFCSQSTHVPFTFGSGTKLEIK |
| SEQ ID NO: 1240 | VH | NVQLQESGPGVKPSQSLSLTCSVAGYSITSGYFWNWIRQFPG |
| | | NKLEWMGYISYDGSNNYNPSLKNRISITRDTSKNQFFLKLNSV |
| | | TTEDTATYYCASPSPGTGYAVDYWGQGTSVTVSS |

VH for Anti-TCRvb19 (humanized) also referred to as Antibody M-H
Binds to human TCRVβ 19

| | | |
|---|---|---|
| SEQ ID NO: 1241 | VH-1 | QVQLQESGPGLVKPSETLSLTCTVSGYSITSGYFWNWIRQPPG |
| | | KGLEWIGYISYDGSNNYNPSLKNRVTISRDTSKNQFSLKLSSVT |
| | | AADTAVYYCASPSPGTGYAVDYWGQGTLVTVSS |
| SEQ ID NO: 1242 | VH-2 | QVQLQESGPGLVKPSETLSLTCTVSGYSITSGYFWNWIRQPPG |
| | | KGLEWIGYISYDGSNNYNPSLKNRVTISRDTSKNQFSLKLSSVT |
| | | AADTAVYYCASPSPGTGYAVDYWGQGTLVTVSS |
| SEQ ID NO: 1243 | VH-3 | QVQLVESGGGLVQPGGSLRLSCSVSGYSITSGYFWNWVRQAP |
| | | GKGLEWVGYISYDGSNNYNPSLKNRFTISRDTSKNTFYLQMNS |
| | | LRAEDTAVYYCASPSPGTGYAVDYWGQGTLVTVSS |

VL for Anti-TCRvb19 (humanized) also referred to as Antibody M-H
Binds to human TCRVβ 19

| | | |
|---|---|---|
| SEQ ID NO: 1244 | VL-1 | VVMTQSPGTLSLSPGERATLSCRSSQSLVHSNGNTYLHWYQQ |
| | | KPGQAPRFLIYKVSNRFSGIPDRFSGSGSGTDFTLTISRLEPEDF |
| | | AVYFCSQSTHVPFTFGQGTKLEIK |
| SEQ ID NO: 1245 | VL-2 | EVVMTQSPATLSLSPGERATLSCRSSQSLVHSNGNTYLHWYQ |
| | | QKPGQAPRFLIYKVSNRFSGIPARFSGSGSGTDFTLTISSLEPED |
| | | FAVYFCSQSTHVPFTFGQGTKLEIK |
| SEQ ID NO: 1246 | VL-3 | EVVMTQSPATLSVSPGERATLSCRSSQSLVHSNGNTYLHWYQ |
| | | QKPGQAPRFLIYKVSNRFSGIPARFSGSGSGTEFTLTISSLQSED |
| | | FAVYFCSQSTHVPFTFGQGTKLEIK |
| SEQ ID NO: 1247 | VL-4 | DVQMTQSPSSLSASVGDRVTITCRSSQSLVHSNGNTYLHWYQ |
| | | QKPGKAPKFLIYKVSNRFSGVPSRFSGSGSGTDFTFTISSLQPED |
| | | IATYFCSQSTHVPFTFGQGTKLEIK |

BL37.2 (murine), also referred to as BJ1539 or Antibody N
Binds to human TCRVβ 9

| | | |
|---|---|---|
| SEQ ID NO: 1248 | HC CDR1 (Kabat) | DYIVH |
| SEQ ID NO: 1249 | HC CDR2 (Kabat) | WINTYTGTPTYADDFEG |
| SEQ ID NO: 1250 | HC CDR3 (Kabat) | SWRRGIRGIGFDY |
| SEQ ID NO: 1251 | HC CDR1 (Chothia) | GYTFTDY |
| SEQ ID NO: 1252 | HC CDR2 (Chothia) | NTYTGT |
| SEQ ID NO: 1250 | HC CDR3 (Chothia) | SWRRGIRGIGFDY |
| SEQ ID NO: 1253 | HC CDR1 (Combined) | GYTFTDYIVH |
| SEQ ID NO: 1249 | HC CDR2 (Combined) | WINTYTGTPTYADDFEG |
| SEQ ID NO: 1250 | HC CDR3 (Combined) | SWRRGIRGIGFDY |
| SEQ ID NO: 1254 | LC CDR1 (Kabat) | KASKSINKYLA |
| SEQ ID NO: 1255 | LC CDR2 (Kabat) | DGSTLQS |
| SEQ ID NO: 1256 | LC CDR3 (Kabat) | QQHNEYPPT |
| SEQ ID NO: 1257 | LC CDR1 (Chothia) | SKSINKY |
| SEQ ID NO: 1255 | LC CDR2 (Chothia) | DQSTLQS |
| SEQ ID NO: 1256 | LC CDR3 (Chothia) | QQHNEYPPT |
| SEQ ID NO: 1254 | LC CDR1 (Combined) | KASKSINKYLA |
| SEQ ID NO: 1255 | LC CDR2 (Combined) | DGSTLQS |
| SEQ ID NO: 1256 | LC CDR3 (Combined) | QQHNEYPPT |
| SEQ ID NO: 1258 | VL | DVQMTQSPYNLAASPGESVSINCKASKSINKYLAWYQQKPGK |
| | | PNKLLIYDGSTLQSGIPSRFSGSGSGTDFTLTIRGLEPEDFGLYY |
| | | CQQHNEYPPTFGAGTKLELK |
| SEQ ID NO: 1259 | VH | QLQLVQSGPELREPGESVKISCKASGYTFTDYIVHWVKQAPGK |
| | | GLKWMGWINTYTGTPTYADDFEGRFVFSLEASASTANLQISNL |
| | | KNEDTATYFCARSWRRGIRGIGFDYWGQGVMVTVSS |

VH for BL37.2 (humanized) also referred to as Antibody N-H
Binds to human TCRVβ 9

| | | |
|---|---|---|
| SEQ ID NO: 1260 | VH-1 | QLQLVQSGAEVKKPGASVKVSCKASGYTFTDYIVHWVRQAP |
| | | GQGLEWMGWINTYTGTPTYADDFEGWVTMTLDASISTAYME |
| | | LSRLRSDDTAVYYCARSWRRGIRGIGFDYWGQGTMVTVSS |
| SEQ ID NO: 1261 | VH-2 | QLQLVQSGAEVKKPGASVKVSCKASGYTFTDYIVHWVRQAP |
| | | GQGLEWMGWINTYTGTPTYADDFEGRVTMTLDASTSTAYME |
| | | LSSLRSEDTAVYYCARSWRRGIRGIGFDYWGQGTMVTVSS |
| SEQ ID NO: 1262 | VH-3 | QLQLVQSGAEVKKPGASVKVSCKASGYTFTDYIVHWVRQAP |
| | | GQRLEWMGWINTYTGTPTYADDFEGRVTITLDASASTAYMEL |
| | | SSLRSEDMAVYYCARSWRRGIRGIGFDYWGQGTMVTVSS |
| SEQ ID NO: 1263 | VH-4 | QLQLVQSGAEVKKPGASVKVSCKASGYTFTDYIVHWVRQAT |
| | | GQGLEWMGWINTYTGTPTYADDFEGRVTMTLNASISTAYME |
| | | LSSLRSEDTAVYYCARSWRRGIRGIGFDYWGQGTMVTVSS |

VL for BL37.2 (humanized) also referred to as Antibody N-H
Binds to human TCRVβ 9

| | | |
|---|---|---|
| SEQ ID NO: 1264 | VL-1 | EVVMTQSPGTLSLSPGERATLSCKASKSINKYLAWYQQKPGQ |
| | | APRLLIYDGSTLQSGIPDRFSGSGSGTDFTLTISRLEPEDFAVYY |
| | | CQQHNEYPPTFGQGTKLEIK |
| SEQ ID NO: 1265 | VL-2 | EVVMTQSPATLSLSPGERATLSCKASKSINKYLAWYQQKPGQ |
| | | APRLLIYDGSTLQSGIPARFSGSGSGTDFTLTISSLEPEDFAVYY |
| | | CQQHNEYPPTFGQGTKLEIK |
| SEQ ID NO: 1266 | VL-3 | DVQMTQSPSSLSASVGDRVTITCKASKSINKYLAWYQQKPGK |
| | | APKLLIYDGSTLQSGVPSRFSGSGSGTDFTLTISSLQPEDFATYY |
| | | CQQHNEYPPTFGQGTKLEIK |
| SEQ ID NO: 1267 | VL-4 | AVRMTQSPSSFSASTGDRVTITCKASKSINKYLAWYQQKPGK |
| | | APKLLIYDGSTLQSGVPSRFSGSGSGTDFTLTISCLQSEDFATYY |
| | | CQQHNEYPPTFGQGTKLEIK |

IG125 (murine) binds to TRVβ 11-2; also referred to as Antibody O

| | | |
|---|---|---|
| SEQ ID NO: 1268 | HC CDR1 (Kabat) | NYGVH |
| SEQ ID NO: 1269 | HC CDR2 (Kabat) | VIWSDGSTDYDTAFIS |
| SEQ ID NO: 1270 | HC CDR3 (Kabat) | RAVVADEDY |
| SEQ ID NO: 1271 | HC CDR1 (Chothia) | GFSLTN |
| SEQ ID NO: 1272 | HC CDR2 (Chothia) | VIWSDGSTD |
| SEQ ID NO: 1270 | HC CDR3 (Chothia) | RAVVADFDY |
| SEQ ID NO: 1273 | HC CDR1 (combined) | GFSLTNYGVH |
| SEQ ID NO: 1269 | HC CDR2 (combined) | VIWSDGSTDYDTAFIS |
| SEQ ID NO: 1270 | HC CDR3 (combined) | RAVVADFDY |
| SEQ ID NO: 1274 | VH | QVQLKQSGPGLLQPSQSLSITCTVSQFSLTNYGVHWVRQSPGK |
| | | GLEWLGVIWSDGSTDYDTAFISRLSISKDNSKSQVFFKLNSLQ |
| | | ADDTAIYYCARRAVVADFDYWGQGTTLTVSS |
| SEQ ID NO: 1275 | LC CDR1 (Kabat) | KASKEVTIFGSISALH |
| SEQ ID NO: 1276 | LC CDR2 (Kabat) | NGAKLES |
| SEQ ID NO: 1277 | LC CDR3 (Kabat) | LQNKEVPFT |
| SEQ ID NO: 1275 | LC CDR1 (Chothia) | KASKEVTIFGSISALH |
| SEQ ID NO: 1276 | LC CDR2 (Chothia) | NGAKLES |
| SEQ ID NO: 1277 | LC CDR3 (Chothia) | LQNKEVPFT |
| SEQ ID NO: 1275 | LC CDR1 (combined) | KASKEVTIFGSISALH |
| SEQ ID NO: 1276 | LC CDR2 (combined) | NGAKLES |
| SEQ ID NO: 1277 | LC CDR3 (combined) | LQNKEVPFT |
| SEQ ID NO: 1278 | VL | DIVLTQSPASLAVSLGQKATISCKASKEVTIFGSISALHWYQQ |
| | | KPGQPPKLIYNGAKLESGVSARFSDSGSQNRSPFGNQLSFTLTI |
| | | APVEADDAATYYCLQNKEVPFTFGSGTKLEIK |

VL for IG125 (humanized) also referred to as Antibody O-H
binds to TRVβ 11-2

| | | |
|---|---|---|
| SEQ ID NO: 1279 | VL-1 | DIVLTQSPDSLAVSLGERATINCKASKEVTIFGSISALHWYQQ |
| | | KPGQPPKLLYNGAKLESGVSARFGVPDRFSRSGSGLDFTLTIS |
| | | SLQAEDVAVYYCLQNKEVPFTFGQGTKLEIK |
| SEQ ID NO: 1280 | VL-2 | EIVLTQSPDFQSVTPKEKVTITCKASKEVTIFGSISALHWYQQK |
| | | PDQSPKLLYNGAKLESGVSARFGVPSRFSRSGSGLDFTLTINS |
| | | LEAEDAATYYCLQNKEVPFTFGQGTKLEIK |
| SEQ ID NO: 1281 | VL-3 | AIQLTQSPSSLSASVGDRVTITCKASKEVTIFGSISALHWYQQK |
| | | PGKAPKLLYNGAKLESGVSARFGVPSRFSRSGSGLDFTLTISS |
| | | LQPEDFATYYCLQNKEVPFTFGQGTKLEIK |
| SEQ ID NO: 1282 | VL-4 | DIVLTQTPLSLSVTPGQPASISCKASKEVTIFGSISALHWYLQK |
| | | PGQPPKLLYNGAKLESGVSARFGVPDRFSRSGSGLDFTLKISR |
| | | VEAEDVGVYYCLQNKEVPFTFGQGTKLEIK |

VH for IG125 (humanized) also referred to as Antibody O-H
binds to TRVβ 11-2

| | | |
|---|---|---|
| SEQ ID NO: 1283 | VH-1 | QVTLKESGPVLVKPTETLTLTCTVSGFSLTNYGVHWVRQPPG |
| | | KALEWLGVIWSDGSTDYDTAFISRLTISKDNSKSQVVLTMTN |
| | | MDPVDTATYYCARRAVVADFDYWGQGTTVTVSS |
| SEQ ID NO: 1284 | VH-2 | QVQLQESGPGLVKPSGTLSLTCAVSGFSLTNYGVHWVRQPPG |
| | | KGLEWLGVIWSDGSTDYDTAFISRLTISKDNSKSQVSLKLSSV |
| | | TAADTAVYYCARRAVVADFDYWGQGTTVTVSS |
| SEQ ID NO: 1285 | VH-3 | QVQLQQSGPGLVKPSQTLSLTCAVSGFSLTNYGVHWVRQSPS |
| | | RGLEWLGVIWSDGSTDYDTAFISRLTINKDNSKSQVSLQLNS |
| | | VTPEDTAVYYCARRAVVADFDYWGQGTTVTVSS |
| SEQ ID NO: 1286 | VH-4 | EVQLVESGGGLVQPGPSLRLSCTVSGFSLTNYGVHWVRQAP |
| | | GKGLEWLGVIWSDGSTDYDTAFISRLTISKDNSKSIVYLQMNS |
| | | LKTEDTAVYYCARRAVVADFDYWGQGTTVTVSS |
| SEQ ID NO: 1287 | IVH-5 | EVQLVQSGAEVKKPGESLRISCKVSGFSLTNYGVHWVRQMP |
| | | GKGLEWLGVIWSDGSTDYDTAFISQLTISKDNSISTVYLQWSS |
| | | LKASDTAMYYCARRAVVADFDYWGQGTTVTVSS |

MR5-2 (marine), Binds to human TCRVβ 13-2

| | | |
|---|---|---|
| SEQ ID NO: 1376 | SCFV (VH + VL) | QVQLQQSGTELMKPGASVKISCKASGYTFSNYWIEWIKQRPG |
| | | HGLEWVGEILPGAGPTNYNEKFKGKATFTADSSSNTAYMQL |
| | | SSLTSEDSAVYYCARTDYDYDWFAYWGQGTLVTVSAGGGG |
| | | SGGGGSGGGGSGGGGSDIVMSQSPSSLAVSVGEKVTMSCKSS |
| | | QSLLYSGNQKNYLAWYQQKPGQSPKLLIYWASTRESGVPDR |
| | | FTGSGSGTDFTLTINSVKAEDLTVYYCQQYYGYPRTFGGGTK |
| | | VEIK |

TABLE 14
Exemplary Fc modifications

| Modification or mutation | Altered effector function |
|---|---|
| Leu235Glu | ADCC; |
| Leu234Ala/Leu235Ala (LALA) | ADCC; ADCP; CDC |
| Ser228Pro/Leu235Glu | |
| Leu234Ala/Leu235Ala/Pro329Gly | ADCP |
| Pro331Ser/Leu234Glu/Leu235Phe | CDC |
| Asp265Ala | ADCC, ADCP |
| Gly237Ala | ADCP |
| Glu318Ala | ADCP |
| Glu233Pro | |
| Gly236Arg/Leu328Arg | ADCC |
| His268Gln/Val309Leu/Ala330Ser/Pro331Ser | ADCC; ADCP; CDC |
| Val234Ala/Gly237Ala/Pro238Ser/ | ADCC; ADCP; CDC |
| His268Ala/Val309Leu/Ala330Ser/Pro331Ser | |
| Leu234Ala/L235Ala/Gly237Ala/P238Ser/ | ADCC; CDC |
| His268Ala/Ala330Ser/Pro331Ser | |
| Ala330Leu | CDC |
| Asp270Ala | CDC |
| Lys322Ala | CDC |
| Pro329Ala | CDC |
| Pro331Ala | CDC |
| Val264Ala | CDC |
| High mannose glycosylation | CDC |
| Phe241Ala | CDC |
| Asn297Ala or Gly or Gln | ADCC; ADCP; CDC |
| S228P/Phe234Ala/Leu235Ala | ADCC; CDC |

TABLE 15
Amino acid sequences of exemplary variable regions of anti-BCMA antibodies.

| SEQ ID | | |
|---|---|---|
| NO | Description | Sequence |
| 3439 | 83A10 VH | EVQLLESGGGLVQPGGSLRLSCAASGFTFSSYAMSWVRQAPGKGLEWVSAISG |
| | | SGGSTYYADSVKGRFTISRDNSKNTLYLQMNSLRAEDTAVYYCAKVLGWFDY |
| | | WGQGTLVTVSS |
| 3440 | 83A10 VL | EIVLTQSPGTLSLSPGERATLSCRASQSVSSSYLAWYQQKPGQAPRLLIYGASSR |
| | | ATGIPDRFSGSGSGTDFTLTISRLEPEDFAVYYCQQYGYPPDFTFGQGTKVEIK |
| 3441 | 17A5 VH | EVQLLESGGGLVQPGGSLRLSCAASGFTFSSYAMSWVRQAPGKGLEWVSAISG |
| | | SGGSTYYADSVKGRFTISRDNSKNTLYLQMNSLRAEDTAVYYCAKVAPYFAPF |
| | | DYWGQGTLVTVSS |
| 3442 | 17A5 VL | EIVLTQSPGTLSLSPGERATLSCRASQSVSSSYLAWYQQKPGQAPRLLIYGASSR |
| | | ATGIPDRFSGSGSGTDFTLTISRLEPEDFAVYYCQQYGNPPLYTFGQGTKVEIK |
| 3443 | 13A4 VH | EVQLVQSGAEVKKPGESLKISCKGSGYSFTSYWIGWVRQMPGKGLEWMGIIYP |
| | | GDSDTRYSPSFQGQVTISADKSISTAYLQWSSLKASDTAMYYCARNGYLGDYW |
| | | GQGTLVTVSS |
| 3444 | 13A4 VL | DIVMTQSPLSLPVTPGEPASISCRSSQSLLHSNGYNYLDWYLQKPGQSPQLLIYL |
| | | GSNRASGVPDRFSGSGSGTDFTLKISRVEAEDVGVYYCMQAMQIPTFGQGTKV |
| | | EIK |
| 3445 | J22.9-xi VH | QVQLQQSGGGLVQPGGSLKLSCAASGIDFSRYWMSWVRRAPGKGLEWIGEINP |
| | | DSSTINYAPSLKDKFIISRDNAKNTLYLQMSKVRSEDTALYYCASLYYDYGDA |
| | | MDYWGQGTSVTVSS |
| 3446 | J22.9-xi VL | DIVMTQSQRFMTTSVGDRVSVTCKASQSVDSNVAWYQQKPRQSPKALIFSASL |
| | | RFSGVPARFTGSGSGTDFTLTISNLQSEDLAEYFCQQYNNYPLTFGAGTKLELK |
| | | R |
| 3447 | 2A1 VH | EVQLVESGGGLVKPGGSLRLSCAASGFTFGDYALSWFRQAPGKGLEWVGVSR |
| | | SKAYGGTTDYAASVKGRFTISRDDSKSTAYLQMNSLKTEDTAVYYCASSGYSS |
| | | GWTPFDYWGQGTLVTVSS |
| 3448 | 2A1 VL | QSVLTQPPSASGTPGQRVTISCSGSSSNIGSNTVNWYQQLPGTAPKLLIFNYHQR |
| | | PSGVPDRFSGSKSGSSASLAISGLQSEDEADYYCAAWDDSLNGWVFGGGTKLT |
| | | VLG |

### Examples

[1205] The present disclosure will be more specifically illustrated by the following Examples. However, it should be understood that the present disclosure is not limited by these examples in any manner.

### Example 1: Humanization of α-TRBV6-5 Antibody Clone Anti-body A

[1206] The germline for the mouse α-TCRβ antibody clone Antibody A VH and VL were assigned using IMGT nomenclature, with CDR regions defined by a combined Kabat and Chothia classification, SEQ ID NO: 1 and SEQ ID NO: 2 are the Antibody A VH and VL sequences respectively where the VH germline is mouse IGHV1S12*01 and the VL germline is mouse IGKV6-15*01, SEQ ID NOs: 3-5 are the Antibody A VH CDR regions 1-3 respectively and SEQ ID NOs: 6-8 correspond to the VL CDR regions 1-3 (as described in Table 1).

[1207] Humanization of the Antibody A VH and VL sequences was done separately using similar methodology. Amino acids positions were identified in the framework regions which were important for the success of CDR grafting. Human germline sequences were identified which preserved the necessary residues and contained a high amount of overall identity. When the human germline framework sequence did not contain a matching important amino acid, it was back mutated to match the mouse sequence CDR regions were grafted onto the human germline unchanged. The Antibody A VH was humanized into human IGHV1-69*01 and the Antibody A VL was humanized into IGKV1-17*01 and IGKV1-27*01. All 3 humanized sequences were confirmed to contain no introduced potential negative post translational modification sites such as NG, DG, NS, NN, DS, NT, NXS, or NXT as a result of the humanization process, SEQ ID NO: 9 is the humanized Antibody A-H.1 VH and SEQ ID NOs: 10 and 11 are the humanized VL IGKV1-17*01 and IGKV1-27*01 germlines respectively (as described in Table 1). FIGS. 2A and 2B show the murine and humanized sequences with annotations depicting the CDR and framework regions (FR).

### Example 2: Humanization of α-TRBV12-3 and TRBV12-4 Antibody Clone Antibody B

[1208] The germline for the mouse α-TCRB antibody clone Antibody B VH and VL were assigned using IMGT nomenclature, with CDR regions defined by a combined Kabat and Chothia classification, SEQ ID NO: 15 and SEQ ID NO: 16 are the Antibody B VH and VL sequences respectively where the VH germline is mouse IGHV5-17*02 and the VL germline is mouse IGKV4-50*01, SEQ ID NOs: 17-19 are the B-H VH CDR regions 1-3 respectively and SEQ ID NOs: 20-22 are the B-H VL CDR regions 1-3 (as described in Table 2).

[1209] The method applied to humanize Antibody A described in Example 1 was used to humanize Antibody B. The Antibody B VH was humanized into human IGHV3-30*01, IGHV3-48*01, and IGHV3-66*01 and the Antibody B VL was humanized into human IGKV1-9*01, IGKV1-39*01, IGKV3-15*01, IGLV1-47*01 and IGLV3-10*01, SEQ ID NOs: 23-25 are the B-H.1A, B-H.1B, and B-H.1C humanized heavy chains and SEQ ID NOs: 26-30 are the B-H.1D, B-H1E, B-H.1F, B-H.1G and B-H.1H humanized light chains (as described in Table 2). FIGS. 3A and 3B show the murine and humanized sequences with annotations depicting the CDR and framework regions (FR).

### Example 3: Characteristics of Anti-TCRβV Antibodies

### Introduction

[1210] Current bispecific constructs designed to redirect T cells to promote tumor cell lysis for cancer immunotherapy typically utilize single chain variable fragments (scFvs) that are derived from monoclonal antibodies (mAb) directed against the CD3e subunit of the T cell receptor (TCR). However, there are limitations to this approach which may prevent the full realization of the therapeutic potential for such bispecific constructs. Previous studies have shown that, e.g., low “activating” doses of anti-CD3e mAb can cause long-term T cell dysfunction and exert immunosuppressive effects. In addition, anti-CD3e mAbs bind to all T cells and thus activate equally all T cells, which has been associated with the first dose side effects of anti-CD3e mAbs that result from massive T cell activation. These large number of activated T cells secrete substantial amounts of cytokines, the most important of which is Interferon gamma (IFNg or IFNγ). This excess amount of IFNγ in turn, e.g., activates macrophages which then can overproduce proinflammatory cytokines such as IL-1, IL-6 and TNF-alpha, causing a “cytokine storm” known as the cytokine release syndrome (CRS). Thus, it might be advantageous to develop antibodies that are capable of binding and activating only a subset of necessary effector T cells to reduce the CRS.

### Results

[1211] To that end, antibodies directed to the variable chain of the beta subunit of TCR (TCR Vb) were identified. These anti-TCR Vb antibodies bind and activate a subset of T cells, but with, e.g., no or markedly reduced CRS. Using plate-bound anti-TCR Vb13.1 mAbs (A-H.1 and A-H.2) it was shown that a population of T cells, defined by positive staining with A-H.1, can be expanded (from ˜5% of T cells on day 0 to almost 60% of total T cells on day 6 of cell culture) (FIGS. SA-5C). For this experiment, human CD3+ T cells were isolated using magnetic-bead separation (negative selection) and activated with immobilized (plate-coated) A-H.1 or OKT3 (anti-CD3e) antibodies at 100 nM for 6 days. The expanded Vb13.1+ T cells display cytolytic activity against transformed cell line RPMI-8226 when co-cultured with purified CD3+ T cells (FIGS. 6A-6B).

[1212] Next, the ability of PBMCs activated by anti-TCR Vβ antibodies to produce cytokines was assessed. The cytokine production of PBMCs activated with anti-TCR Vβ antibodies was compared to the cytokine production of PBMCs activated with: (i) anti-CD3e antibodies (OKT3 or SP34-2); (ii) anti-TCR V alpha (TCR VA) antibodies including anti-TCR VA 12.1 antibody 6D6.6, anti-TCR VA24JA 18 antibody 6B11; (iii) anti-TCR alpha beta antibody T10B9; and/or (iv) isotype control (BGM0109). The anti-TCR VB antibodies tested include: humanized anti-TCRVB 13.1 antibodies (A-H.1, or A-H.2), murine anti-TCR VB5 antibody E, murine anti-TCR VB8.1 antibody B, and murine anti-TCR VB12 antibody D. BGM0109 comprises the amino acid sequence of

(SEQ ID NO: 3282)
METDTLLLWVLLLWVPGSTGGLNDIFEAQKIEWHEGGGGSEPRTDTDTCPNPPDPCPTCPTPDLLGG
PSVFIFPPKPKDVLMISLTPKITCVVVDVSEEEPDVQFNWYVNNVEDKTAQTETRQRQYNSTYRVVS
VLPIKHQDWMSGKVFKCKVNNNALPSPIEKTISKPRGQVRVPQIYTFPPPIEQTVKKDVSVTCLVTGF
LPQDIHVEWESNGQPQPEQNYKNTQPVLDSDGSYFLYSKLNVPKSRWDQGDSFTCSVIHEALHNHH
MTKTISRSLGNGGGGS.

[1213] As shown in FIG. 7A, when plate-bound A-H.1 or A-H.2, or anti-CD3e antibodies (OKT3 or SP34-2) were used to activate human PBMCs, the T cell cytokine IFNg was induced (FIG. 7A). All anti-TCR VB antibodies tested had a similar effect on the production of IFNg (FIG. 7B). The anti-TCR VA antibodies did not induce similar IFNg production.

[1214] With respect to IL-2 production, PBMCs activated with A-H.1 and A-H.2 resulted in increased IL-2 production (FIG. 8A) with delayed kinetics (FIG. 8B) as compared to PBMCs activated with anti-CD3e antibodies (OKT3 or SP34-2). FIG. 8B shows that anti-TCR Vβ antibody activated PBMCs demonstrate peak production of IL-2 at Day 5 or Day 6 post-activation (incubation with plate-coated antibodies). In contrast. IL-2 production in PBMCs activated with OKT3 peaked at day 2 post-activation. As with IFNG, the IL-2 effect (e.g., enhanced production of IL-2 and delayed kinetics) was similar across all anti-TCR Vβ antibodies tested (FIG. 8B).

[1215] The production of cytokines IL-6, IL-1β and TNF-alpha which are associated with “cytokine storms” (and accordingly CRS) was also assessed under similar conditions. FIGS. 9A, 9A and 10A shows that while PBMCs activated with anti-CD3e antibodies demonstrate production of IL-6 (FIG. 9A), TNF-alpha (FIG. 10A) and IL-1β (FIG. 11A), no or little induction of these cytokines was observed with PBMCs activated with A-H.1 or A-H.2. As shown in FIGS. 10B and 11B, TNF-alpha and IL-1β production was not induced by activation of PBMCs with any of the anti-TCR Vβ antibodies.

[1216] It was further noted that the kinetics of IFNg production by A-H.1-activated CD3+ T cells was delayed relative to those produced by CD3+ T cells activated by anti-CD3e mAbs (OKT3 and SP34-2) (FIGS. 12A and 12B).

[1217] Finally, it was observed that the subset of memory effector T cells known as TEMRA Was preferentially expanded in CD8+ T cells activated by A-H.1 or A-H.2 (FIG. 13). Isolated human PBMCs were activated with immobilized (plate-coated) anti-CD3e or anti-TCR Vβ13.1 at 100 nM for 6-days. After a 6-day incubation. T-cell subsets were identified by FACS staining for surface markers for Naïve T cell (CD8+, CD95-, CD45RA+, CCR7+), T stem cell memory (TSCM; CD8+, CD95+, CD45RA+, CCR7+), T central memory (Tcm; CD8+, CD95+. CD45RA-, CCR7+). T effector memory (Tem; CD8+, CD95+, CD45RA−, CCR7-), and T effector memory re-expressing CD45RA (Temra; CD8+. CD95+, CD45RA+, CCR7−). Human PBMC's activated by anti-TCR Vβ13.1 antibodies (A-H.1 or A-H.2) increased CD8+ TSCM and Temra T cell subsets when compared to PBMCs activated by anti-CD3e antibodies (OKT3 or SP34-2). Similar expansion was observed with CD4+ T cells.

### Conclusion

[1218] The data provided in this Example show that antibodies directed against TCR Vb can, e.g., preferentially activate a subset of T cells, leading to an expansion of T_{EMRA}, which can, e.g., promote tumor cell lysis but not CRS. Thus, bispecific constructs utilizing either a Fab or scFV or a peptide directed to the TCR Vb can, e.g., be used to activate and redirect T cells to promote tumor cell lysis for cancer immunotherapy, without, e.g., the harmful side-effects of CRS associated with anti-CD3e targeting.

### Example 4: On-Target T Cell Mediated Cytotoxicity of Multiple Myeloma (MM) Cells with a Dual-Targeting Antibody Molecule Against BCMA and a T Cell Engager

[1219] This example shows on-target T cell mediated cytotoxicity of multiple myeloma (MM) cells with dual-targeting antibody molecules that recognize a T cell engager, e.g., TCRVb, on T cells and BCMA on MM cells.

[1220] As shown in FIG. 14A, purified human T cells activated with plate-bound anti-TCRVb antibody for 5 days proliferate at a higher rate than purified human T cells activated with plate-bound anti-CD3 (OKT3) antibody. Anti-TCRVb antibody stimulation of T cells resulted in selective expansion of CD45RA+ effector memory CD8+ and CD4+ T cells (TEMRA) cells (FIG. 14B). Both CD8+ and CD4+ Temra cell populations expanded more when stimulated with an anti-TCRVb antibody, compared to unstimulated cells or cells stimulated with an anti-CD3 (SP34) antibody. Anti-TCRVb antibodies resulted in delayed secretion of IFN-g by PBMCs stimulated with an anti-TCRVb antibody compared to PBMCs stimulated with anti-CD3 antibodies (FIG. 14C). Additionally, T cells stimulated with anti-TCRVb antibody or anti-CD3 antibodies resulted in comparable lysis of multiple myeloma target cells, as shown in FIG. 14D. As shown in FIGS. 14E-14F, T cells stimulated for 5 days with 100 ng/ml plate-bound an anti-TCRVb antibody, or an anti-CD3 antibody secreted perforin and Granzyme B.

[1221] Activation of PBMCs with anti-TCRVb antibody resulted in higher production and/or secretion of IL-2 and/or IL-15 compared to PBMCs activated with an anti-OKT3 antibody (FIG. 15A). Anti-TCRVb antibody activated of PBMCs also resulted in expansion and/or survival, e.g., proliferation of Natural Killer (NK) cells (FIG. 15B). In comparison, PBMCS activated with an anti-OKT3 antibody did not result in NK cell expansion. Further, as described in Example 3, PBMCs activated with an anti-TCRVb antibody did not result in the production of cytokines IL-6, IL-1β and TNF-alpha which are associated with CRS (FIG. 16). These in vitro characterization studies show that in some embodiments, anti-TCRVb antibodies, e.g., activate and/or stimulate, T cells to promote T cell killing as evidenced by target cell lysis, perforin secretion and granzyme B secretion, and secretion of IFN-g with, e.g., delayed kinetics.

[1222] Next, the ability of a dual-targeting antibody molecule (Molecule I), which targets BCMA on one arm and TCRVb on the other arm, to target and kill multiple myeloma (MM) cells was tested. Healthy donor PBMCs were co-incubated with the RMPI8226 MM cell line and one of the following dual-targeting antibody molecules: BCMA-TCRVb (Molecule I), BCMA-CD3, or Control-TCRVb; or an isotype control Target cell lysis was then assessed using flow cytometry. As shown in FIG. 17A, the dual-targeting BCMA-TCRVb antibody molecule (Molecule I) resulted in killing of MM cells in vitro.

[1223] The dual-targeting BCMA-TCRVb antibody molecule (Molecule 1) was further tested in vivo for its ability to inhibit MM tumor growth in a MM mouse model. The NCI-H929 cell line was injected in NOD-scid IL2rγnull (NSG) recipient mice on Day 0 followed by delivery of PBMCs on Day 9. On Days 12, 15, 18 and 21, the dual-targeting BCMA-TCRVb antibody molecule (Molecule I) was administered via intraperitoneal injection at a dose of 0.5 mg/kg. FIG. 17B shows prevention, e.g., inhibition, of MM tumor growth in vivo with the dual-targeting BCMA-TCRVb antibody molecule (Molecule I). These results demonstrate that in some embodiments the dual-targeting BCMA-TCRVb antibody molecule, e.g., can kill tumor cells, e.g., MM tumor cells, in vitro and in vivo. Accordingly, in some embodiments, a dual-targeting BCMA-TCRVb antibody molecule can be used, e.g., as a therapy for cancer, e.g., a hematological cancer, e.g., MM.

### Example 5: In Vitro Cytotoxicity of a Dual-Targeting Antibody Molecule Against FcRH5 and a T Cell Engager

[1224] This example shows in vitro cytotoxicity on multiple myeloma (MM) cells with a dual-targeting antibody molecule that recognizes a T cell engager, e.g., TCRVb, on T cells and FcRH5 on MM cells. Healthy donor PBMCs or purified T cells were co-incubated with the MOL8M MM cell line and a dual-targeting antibody molecule which targets FcRH5 on one arm and TCRVb on the other arm (Molecule E), or with an isotype control antibody. Target cell lysis was then assessed using flow cytometry. As shown in FIG. 18, the dual targeting FcRH5-TCRVb molecule (Molecule E) resulted in killing of MM cells by both purified T cells or PBMCs. This shows that the dual targeting FcRH5-TCRVb molecule can target and promote killing of MM cells by immune cells, e.g., in PBMCs, including T cells.

### Example 6: Characteristics of Anti-TCR Vβ8a Antibodies

[1225] This Example shows in vitro characterization of anti-TCR Vβ8a antibodies (B-H.1). TCR Vβ8 is also referred to as TCR Vβ12 (as described in Table 8A). Isolated human PBMCs were activated with immobilized (plate-coated) anti-CD3ε or anti-TCR Vβ8a at 100 nM, and cell culture supernatants were collected on day 1, 2, 3, 5, 6 and 8 post stimulation. Cytokines (IFNγ, IL-2, TNFα, IL-1β or IL-6) were measured using MSD technology platform (MesoScale Discovery) as described in the manufacturer's protocol.

[1226] As shown in FIGS. 19A-19B, Human PBMCs activated by anti-TCR Vβ8a antibodies (B-H.1) produce similar or reduced levels of IFNγ (FIG. 19A) and higher levels IL-2 (FIG. 19B) when compared to those activated by anti-CD3e antibodies (OKT3 or SP34-2).

[1227] FIGS. 20A-20B show that human PBMCs activated by anti-TCR Vβ8a antibodies (B-H.1) do not produce significant levels of IL-6, or IL1b. Activation of human PBMCs with anti-TCR Vβ8a antibodies (B-H. 1) also results in lesser TNFalpha when compared to PBMCs activated by anti-CD3€ antibodies (OKT3 or SP34-2) (see FIG. 20C).

[1228] In summary, as shown in Example 3, this Example shows that anti-TCR Vβ8a antibodies can, e.g., preferentially induce expression of T cell cytokines, e.g., IL-2 and IFNg, but not production of cytokines IL-6. IL-1β and TNF-alpba which are associated with “cytokine storms” (and accordingly CRS).

### Example 7: Characteristics of Anti-TCRβV Antibody D Antibody

[1229] This Example describes characterization of anti-TCRβV antibodies which can bind and activate a subset of T cells, but with, e.g., no or markedly reduced, CRS.

[1230] Human PBMCs were isolated from whole blood followed by solid-phase (plate-coated) stimulation with anti-TCR Vβ12 antibody (Antibody D) or anti-CD3e antibodies (OKT3) at 100 nM. Supernatant was collected on Days 1, 2, 3, 5, or 6 followed by multiplex cytokine analysis for IFNg, IL-2, IL-6, IL-1beta, or TNFalpha. The data was quantified using MSD (Meso Scale Discovery) platform, following the manufacturer's protocol.

[1231] As shown in FIG. 21A, when plate-bound anti-TCR Vβ12 antibody (Antibody D) or anti-CD3e antibodies (OKT3) were used to activate human PBMCs, the T cell cytokine IFNg was induced. With respect to IL-2 production, PBMCs activated with anti-TCR Vβ12 antibody (Antibody D) resulted in increased IL-2 production with delayed kinetics (FIG. 21B) as compared to PBMCs activated with anti-CD3e antibodies (OKT3).

[1232] The production of cytokines IL-6, IL-1β and TNF-alpha which are associated with “cytokine storms” (and accordingly CRS) was also assessed under similar conditions. FIGS. 21C-21E show that that while PBMCs activated with anti-CD3e antibodies demonstrate production of IL-6 (FIG. 21D). TNF-alpha (FIG. 21C) and IL-1β (FIG. 21E), no or little induction of these cytokines was observed with PBMCs activated with anti-TCR Vβ12 antibody (Antibody D).

[1233] The data provided in this Example show that antibodies directed against TCR Vβ can, e.g., preferentially activate a subset of T cells, and do not result in induction of cytokines associated with cytokine storms or CRS.

### Example 8: Characteristics of Anti-TCRβV Antibody E

[1234] This Example describes characterization of anti-TCRβV antibodies which can bind and activate a subset of T cells, but with, e.g., no or markedly reduced, CRS.

[1235] Human PBMCs were isolated from whole blood followed by solid-phase (plate-coated) stimulation with anti-TCR Vβ5 antibody (Antibody E) or anti-CD3e antibodies (OKT3 and SP34-2), each at 100 nM. Supernatant was collected on Days 1, 3, 5, or 7 followed by multiplex cytokine analysis for IFNg, IL-2, IL-6, IL-1beta, IL-10 or TNFalpha. The data was quantified using MSD (Meso Scale Discovery) platform, following the manufacturer's protocol.

[1236] As shown in FIG. 22A, when plate-bound anti-TCR Vβ5 antibody (Antibody E) or anti-CD3e antibodies (OKT3 and SP34-2) were used to activate human PBMCs, the T cell cytokine IFNg was induced. With respect to IL-2 production. PBMCs activated with anti-TCR Vβ5 antibody (Antibody E) resulted in increased IL-2 production with delayed kinetics (FIG. 22B) as compared to PBMCs activated with anti-CD3e antibodies (OKT3 or SP34-2).

[1237] The production of cytokines IL-6, IL-1β, IL-10 and TNF-alpha which are associated with “cytokine storms” (and accordingly CRS) was also assessed under similar conditions. FIGS. 23A-23D show that that while PBMCs activated with anti-CD3e antibodies demonstrate production of IL-1β (FIG. 23A), IL-6 (FIG. 23B), TNF-alpha (FIG. 23C) and IL-10 (FIG. 23D), no or little induction of these cytokines was observed with PBMCs activated with anti-TCR Vβ5 antibody (Antibody E).

[1238] The data provided in this Example show that antibodies directed against TCR Vβ can, e.g., preferentially activate a subset of T cells, and do not result in induction of cytokines associated with cytokine storms or CRS

### Example 9: Characteristics of a Dual-Targeting Antibody Molecule Against BCMA and TCRβV

[1239] This Example describes characterization of a dual targeting antibody (e.g., a bispecific molecule) comprising an anti-TCRβV binding moiety and a BCMA binding moiety (Molecule H) which can bind and activate a subset of T cells, but with, e.g., no or markedly reduced, CRS.

[1240] Human PBMCs were isolated from whole blood followed by solid-phase (plate-coated) stimulation with an anti-TCRβV×BCMA bispecific molecule (Molecule H) or anti-CD3e antibodies (OKT3), each at 100 nM. Supernatant was collected on Days 1, 2, 3, or 5 followed by multiplex cytokine analysis for IFNg, IL-2, IL-6, IL-1beta, IL-10 or TNFalpha. The data was quantified using MSD (Meso Scale Discovery) platform, following the manufacturer's protocol.

[1241] As shown in FIG. 24A, when plate-bound anti-TCRβV×BCMA bispecific molecule (Molecule H) or anti-CD3e antibodies (OKT3) were used to activate human PBMCs, the T cell cytokine IFNg was induced. With respect to IL-2 production, PBMCs activated with anti-TCRβV×BCMA bispecific molecule (Molecule H) resulted in increased IL-2 production (FIG. 24B) as compared to PBMCs activated with anti-CD3e antibodies (OKT3).

[1242] The production of cytokines IL-6, IL-1β, IL-10 and TNF-alpha which are associated with “cytokine storms” (and accordingly CRS) was also assessed under similar conditions. FIGS. 24C-24E show that that while PBMCs activated with anti-CD3e antibodies demonstrate production of IL-1β (FIG. 24C), IL-6 (FIG. 24D), TNF-alpha (FIG. 24D) and IL-10 (FIG. 24E), no or little induction of these cytokines was observed with PBMCs activated with anti-TCRβV×BCMA bispecific molecule (Molecule H).

[1243] The data provided in this Example show that antibodies directed against TCR Vβ can, e.g., preferentially activate a subset of T cells, and do not result in induction of cytokines associated with cytokine storm or CRS.

### Example 10: Cytokine and Chemokine Profile of Anti-TCRVb Antibodies

[1244] This Examples describes cytokines and chemokines secreted by PBMCs following activation by anti-TCR Vβ antibodies.

[1245] Human PBMCs were isolated from whole blood followed by solid-phase (plate-coated) stimulation with an anti-TCRβV antibodies (A-H.1, B-H.1), or a bispecific molecule comprising an anti-TCRVb antibody (Molecule H), an isotype control (BGM0122) or an anti-CD3e antibody (SP34), each at 100 nM. Supernatant was collected on Days 1, 2, 3, 4, 5, 6, 7 and 8 followed by multiplex analysis for the indicated cytokines or chemokines. The data was quantified using MSD (Meso Scale Discovery) platform, following the manufacturer's protocol. BGM0122 comprises the amino acid sequence of

(SEQ ID NO: 3283)
METDTLLLWVLLLWVPGSTGDKTHTCPPCPAPELLGGPSVFLFPPKPKDTLMISRTPEVTCVVVDVS
HEDPEVKFNWYVDGVEVHNAKTKPREEQYNSTYRVVSVLTVLHQDWLNGKEYKCKVSNKALPAPI
EKTISKAKGQPREPQVYTLPPSREEMTKNQVSLTCLVKGFYPSDIAVEWESNGQPENNYKTTPPVLDS
DGSFFLYSKLTVDKSRWQQGNVFSCSVMHEALHNHYTQKSLSLSPGKGGGGSGGGGSGLNDIFEAQ
KIEWHE

[1246] FIGS. 26A-26J, FIGS. 27A-27H, and FIGS. 28A-28L show the levels of cytokine and chemokine from PBMCs activated with the indicated antibodies.

[1247] As shown in FIG. 26A, when plate-bound anti-TCR Vβ antibodies or anti-CD3e antibodies (OKT3) were used to activate human PBMCs, the T cell cytokine IFNg was induced. With respect to IL-2 production, PBMCs activated with anti-TCR Vβ antibodies resulted in increased IL-2 production with delayed kinetics (FIG. 26B) as compared to PBMCs activated with anti-CD3e antibody (OKT3).

[1248] While IL-1beta (FIG. 26C), IL-6 (FIG. 26D), IL-10 (FIG. 26E), IL-4 (FIG. 26F), TNFalpha (FIG. 26G), IP-10 (FIG. 27C), IL-12-23p40 (FIG. 28D), IL-17A (FIG. 28G), and IL-1a (FIG. 28H), were induced by anti-CD3e antibody (OKT3), no or little induction of these cytokines or chemokines was observed with PBMC's activated with anti-TCRVb antibodies.

[1249] PBMCs activated with anti-TCR Vβ antibodies demonstrated induction of IL-13 (FIG. 261), IL-8 (FIG. 26J), Eotaxin (FIG. 27A), Eotaxin 3 (FIG. 27B), IL-18 (HA) (FIG. 27C), MCP-1 (FIG. 27E), MCP-4 (FIG. 27F), MDC (FIG. 27G), MIP1a (FIG. 27H), MIP1B (FIG. 28A), TARC (FIG. 28B), GM-CSF (FIG. 28C), IL-15 (FIG. 28E), IL-1β (FIG. 28F), and IL-15 (FIG. 28I), IL-7 (FIG. 28J).

### Example 11: Nanostring-Based Gene Expression Profiling of TCR Vb-Activated T Cells

[1250] This Example describes gene expression profiling of TCR Vβ-activated T cells to, e.g., uncover potential mechanisms or pathways underlying TCR Vβ activation of T cells.

[1251] In a first study, the anti-TCR Vβ13.1 antibody A-H.1 was compared with an anti-CD3 antibody OKT3. Briefly, human PBMCs were isolated from whole blood. From isolated PBMCs, human CD3+ T cells were isolated using magnetic-bead separation (negative selection) (Miltenyi biotec) and activated by immobilized (plate-coated) anti-TCR Vβ13.1 antibody (A-H.1) or anti-CD3 antibody (OKT3) at 100 nM for 6 days. Activated T-cells (from plate-coated) were then prepared for gene expression profiling (PanCancer IO 360™ Panel, nanoString), following manufacturer's protocol. Differential gene expression analysis was grouped by anti-TCR Vβ13.1 (A-H.1) vs anti-CD3 (OKT3) activated T-cells using the nSolver Analysis Software (Nanostring). Data shown in Table 16A are mean values from 3 donors. The differentially regulated genes shown in Table 16A have a p-value of 0.05 or less. In the fourth column of Table 16A showing fold changes in gene expression, a positive value indicates genes that are upregulated at the transcriptional level in TCR Vβ-activated T cells compared to OKT3-activated T cells, whereas a negative value indicates genes downregulated at the transcriptional level in TCR Vβ-activated T cells compared to OKT3-activated T cells.

[1252] In a second study, the multispecific anti-TCR Vβ13.1/anti-BCMA antibody Molecule H was compared with the anti-CD3 antibody OKT3. Purified T cells were stimulated with solid-phase anti-TCR Vβ antibody over 6 days with the anti-TCR Vβ antibody Molecule H or anti-CD3e antibody (OKT3) at 100 nM. Expanded T cells were collected by centrifugation followed by RNA extraction. Seven hundred and seventy eight (778) immunology-related genes were counted using the nCounter Technology (Nanostring) followed by gene expression analysis using nSolver analysis tools. The data described in this Example is representative of 3 donors.

[1253] Based on this analysis, a panel of genes were identified as being differentially regulated in TCR Vβ-activated T cells compared to OKT3-activated T cells (Table 16B). The differentially regulated genes shown in Table 16B have a p-value of 0.05 or less. For example, LIF, CD40LG, PDCD1, CXCR5, LTA, and CD80 are all upregulated at the transcriptional level in TCR Vβ-activated T cells compared to OKT3-activated T cells. GZMK, ENTPD1 (CD39), TCF7, CD96, HLA-DRB4, SIGIRR and SELL are downregulated at the transcriptional level in TCR Vβ-activated T cells compared to OKT3-activated T cells. TCR Vβ-activated T cells also expressed high levels of cytolytic effectors (e.g., IFNg, Granzyme B and perforin).

TABLE 16A
Summary of genes whose expression are preferentially regulated
in TCR Vβ-activated T cells compared to OKT3-activated T cells.

| | | | TCR Vβ13.1 | |
|---|---|---|---|---|
| | | | vs OKT3 | |
| Probe Name | Accession # | NS Probe ID | Fold Change | P value |
| CCR2 | NM_001123041.2 | NM_001123041.2:743 | −3.06 | 0.00019145 |
| LIF | NM_002309.3 | NM_002309.3:1240 | 21.6 | 0.0003319 |
| TCF7 | NM_003202.2 | NM_003202.2:2420 | −8.38 | 0.00037035 |
| PLA2G6 | NM_001004426.1 | NM_001004426.1:1954 | −2.19 | 0.00043564 |
| CD84 | NM_001184879.1 | NM_001184879.1:28 | −3.81 | 0.00062413 |
| ITGB2 | NM_000211.2 | NM_000211.2:520 | −2.11 | 0.0012003 |
| GZMK | NM. 002104.2 | NM_002104.2:700 | −11.09 | 0.00135083 |
| HLA-DRB4 | NM_021983.4 | NM_021983.4:194 | −5.75 | 0.00137591 |
| CCR7 | NM_001838.2 | NM_001838.2:1610 | −2.43 | 0.00165716 |
| PDCD1 | NM_005018.1 | NM_005018.1:175 | 7.24 | 0.00195468 |
| CD96 | NM_005816.4 | NM_005816.4:1355 | −6.44 | 0.00221401 |
| SELL | NR_029467.1 | NR_029467.1:1585 | −5 | 0.00227156 |
| NFATC4 | NM_001136022.2 | NM_001136022.2:2296 | −2.75 | 0.0025171 |
| CD8B | NM_004931.3 | NM_004931.3:440 | −3.56 | 0.00302475 |
| NLRC5 | NM_032206.4 | NM_032206.4:860 | −2.27 | 0.00309164 |
| CD1C | NM_001765.2 | NM_001765.2:750 | 8.62 | 0.0035729 |
| HLA-B | NM_005514.6 | NM_005514.6:937 | −1.81 | 0.00363669 |
| NUP107 | NM_020401.2 | NM_020401.2:1002 | 1.64 | 0.00366886 |
| CD3D | NM_000732.4 | NM_000732.4:110 | −2.05 | 0.00401569 |
| HDAC3 | NM_003883.2 | NM_003883.2:1455 | −1.41 | 0.0042794 |
| PRKCE | NM_005400.2 | NM_005400.2:1695 | −1.86 | 0.00429076 |
| HLA-DQB1 | NM_002123.3 | NM_002123.3:384 | −5.71 | 0.00430297 |
| AKT3 | NM_181690.1 | NM_181690.1:755 | −2.98 | 0.00430433 |
| VCAM1 | NM_001078.3 | NM_001078.3:2535 | −23.93 | 0.00464703 |
| CD53 | NM_001040033.1 | NM_001040033.1:835 | −1.7 | 0.00507702 |
| LRP1 | NM_002332.2 | NM_002332.2:4240 | −2.22 | 0.00508974 |
| CD28 | NM_001243078.1 | NM_001243078.1:2065 | −1.73 | 0.00545641 |
| OSM | NM_020530.4 | NM_020530.4:580 | 8.97 | 0.00558554 |
| CLEC4A | NM_194448.2 | NM_194448.2:388 | −1.7 | 0.0056661 |
| MFGE8 | NM_001114614.1 | NM_001114614.1:328 | −2.75 | 0.00633707 |
| IFNAR2 | NM_000874.3 | NM_000874.3:631 | −3.69 | 0.00659279 |
| LTA | NM_000595.2 | NM_000595.2:885 | 6.53 | 0.00727884 |
| ITGAE | NM_002208.4 | NM_002208.4:3405 | −3.42 | 0.00779862 |
| CXCR5 | NM_001716.3 | NM_001716.3:2618 | 4.38 | 0.00781195 |
| CD6 | NM_006725.3 | NM_006725.3:1280 | −1.38 | 0.00848703 |
| ICOS | NM_012092.2 | NM_012092.2:640 | 1.74 | 0.00914866 |
| NOS2A | NM_153292.1 | NM_153292.1:546 | −2.29 | 0.0095337 |
| CD1A | NM_001763.2 | NM_001763.2:1815 | 5.12 | 0.00956367 |
| CD27 | NM_001242.4 | NM_001242.4:330 | −3.41 | 0.00984676 |
| KLRD1 | NM_002262.3 | NM_002262.3:542 | −6.43 | 0.00998325 |
| TARP | NM_001003799.1 | NM_001003799.1:560 | −3.71 | 0.00998698 |
| HLA-DPB1 | NM_002121.4 | NM_002121.4:931 | −8.85 | 0.01064161 |
| PTPRC | NM_080921.3 | NM_080921.3:258 | −2.86 | 0.01124117 |
| CD44 | NM_001001392.1 | NM_001001392.1:429 | −2.07 | 0.01138242 |
| SLAMF6 | NM_001184714.1 | NM_001184714.1:1032 | −1.81 | 0.00175123 |
| HLA-DMB | NM_002118.3 | NM_002118.3:20 | −6.39 | 0.01184625 |
| CD276 | NM_001024736.1 | NM_001024736.1:2120 | 6.22 | 0.01207813 |
| MAGEA1 | NM_004988.4 | NM_004988.4:476 | −2.93 | 0.01210408 |
| HLA-DMA | NM_006120.3 | NM_006120.3:380 | −5.75 | 0.1210789 |
| EP300 | NM_001429.2 | NM_001429.2:715 | −1.24 | 0.01228626 |
| ADA | NM_000022.2 | NM_000022.2:1300 | −2.97 | 0.01228787 |
| CAM1 | NM_000201.2 | NM_000201.2:2253 | 2.52 | 0.01290081 |
| SIGIRR | NM_021805.2 | NM_021805.2:469 | −4.46 | 0.01309473 |
| TNF | NM_000594.2 | NM_000594.2:1010 | 4.6 | 0.01318389 |
| IL1RAP | NM_002182.2 | NM_002182.2:460 | 2.77 | 0.01329693 |
| CSF1 | NM_000757.4 | NM_000757.4:823 | 2.55 | 0.01373637 |
| CD40LG | NM_000074.2 | NM_000074.2:1225 | 11.92 | 0.01376174 |
| CYFIP2 | NM_001037332.2 | NM_001037332.2:4043 | −1.38 | 0.01389707 |
| MUC1 | NM_001018017.1 | NM_001018017.1:725 | 3.12 | 0.01399543 |
| HLA-DRB3 | NM_022555.3 | NM_022555.3:698 | −7.11 | 0.01404049 |
| CD2 | NM_001767.3 | NM_001767.3:687 | −1.53 | 0.01432842 |
| IL2RG | NM_000206.1 | NM_000206.1:595 | −1.82 | 0.01477006 |
| HLA-A | NM_002116.5 | NM_002116.5:1000 | −1.96 | 0.01454336 |
| TXK | NM_003328.1 | NM_003328.1:800 | −2.7 | 0.01590341 |
| ITGA4 | NM_000885.4 | NM_000885.4:975 | −3.59 | 0.01601785 |
| DHX16 | NM_001164239.1 | NM_001164239.1:2490 | 1.41 | 0.0167432 |
| CD3E | NM_000733.2 | NM_000733.2:75 | −1.52 | 0.01736902 |
| MR1 | NM_001531.2 | NM_001531.2:7695 | −2.26 | 0.01744764 |
| SMAD3 | NM_005902.3 | NM_005902.3:4220 | −2.82 | 0.01751245 |
| CCRL2 | NM_003965.4 | NM_003965.4:1110 | −1.87 | 0.01834479 |
| HRAS | NM_005343.2 | NM_005343.2:396 | 1.97 | 0.0187379 |
| IL18R1 | NM_003855.2 | NM_003855.2:2025 | 2.36 | 0.01896204 |
| CMA1 | NM_001836.2 | NM_001836.2:561 | −1.96 | 0.01964938 |
| PSMB7 | NM_002799.2 | NM_002799.2:420 | 1.53 | 0.01980367 |
| BCL 10 | NM_003921.2 | NM_003921.2:1250 | −1.38 | 0.01981376 |
| HLA-DRA | NM_019111.3 | NM_019111.3:335 | −7.46 | 0.02026993 |
| CD80 | NM_005191.3 | NM_005191.3:1288 | 4.18 | 0.02055337 |
| PIK3CD | NM_005026.3 | NM_005026.3:2978 | −1.23 | 0.02056576 |
| ETS1 | NM_005238.3 | NM_005238.3:4625 | −1.51 | 0.02083359 |
| CHUK | NM_001278.3 | NM_001278.3:860 | 1.67 | 0.0217326 |
| CCL5 | NM_002985.2 | NM_002985.2:280 | −2.47 | 0.02195802 |
| ITGAL | NM_002209.2 | NM_002209.2:3905 | −3 | 0.02244779 |
| TNFRSF18 | NM_004195.2 | NM_004195.2:445 | −3.76 | 0.02330885 |
| EIF2B4 | NM_172195.3 | NM_172195.3:1390 | 1.28 | 0.02349098 |
| CD79A | NM_001783.3 | NM_001783.3:695 | −4.47 | 0.02361746 |
| ABCF1 | NM_001090.2 | NM_001090.2:850 | 1.31 | 0.02452054 |
| CD37 | NM_001774.2 | NM_001774.2:535 | −2.06 | 0.02476513 |
| STAT5B | NM_012448.3 | NM_012448.3:200 | −1.56 | 0.02495121 |
| CSF2 | NM_000758.2 | NM_000758.2:475 | 11.38 | 0.0256982 |
| STAT3 | NM_139276.2 | NM_139276.2:4535 | −1.47 | 0.02629936 |
| GZMA | NM_006144.2 | NM_006144.2:155 | −2.46 | 0.02646368 |
| C1R | NM_001733.4 | NM_001733.4:760 | −3.1 | 0.02653879 |
| MIF | NM_002415.1 | NM_002415.1:319 | −1.38 | 0.02690018 |
| CD46 | NM_172350.1 | NM_172350.1:365 | −1.36 | 0.02725208 |
| PIK3CG | NM_002649.2 | NM_002649.2:2125 | −2.34 | 0.02762105 |
| CFB | NM_001710.5 | NM_001710.5:2029 | −2.59 | 0.02802998 |
| IL3 | NM_000588.3 | NM_000588.3:130 | 13.37 | 0.02820076 |
| TNFRSF13C | NM_052945.3 | NM_052945.3:789 | −2.2 | 0.02835259 |
| MRPS5 | NM_031902.3 | NM_031902.3:390 | 1.2 | 0.02849936 |
| TUBB | NM_178014.2 | NM_178014.2:320 | 1.06 | 0.02874459 |
| PECAM1 | NM_000442.3 | NM_000442.3:1365 | −4.35 | 0.02901845 |
| PVR | NM_006505.3 | NM_006505.3:604 | 2.28 | 0.0299334 |
| AMICA1 | NM_153206.2 | NM_153206.2:620 | −2.38 | 0.03034954 |
| CD74 | NM_001025159.1 | NM_001025159.1:964 | −3.28 | 0.0305419 |
| ENTPD1 | NM_001098175.1 | NM_001098175.1:8830 | −8.02 | 0.03085618 |
| CD97 | NM_078481.2 | NM_078481.2:1370 | −1.56 | 0.03086014 |
| KLRK1 | NM_007360.3 | NM_007360.3:522 | −4.16 | 0.03108504 |
| HLA-DQA1 | NM_002122.3 | NM_002122.3:261 | −5.51 | 0.03126291 |
| CD247 | NM_198053.1 | NM_198053.1:1490 | −1.88 | 0.03182703 |
| IFNG | NM_000619.2 | NM_000619.2:970 | 5.98 | 0.03202586 |
| SAA1 | NM_199161.1 | NM_199161.1:135 | −2.35 | 0.03341258 |
| TBX21 | NM_013351.1 | NM_013351.1:890 | 1.92 | 0.03359165 |
| RORA | NM_134261.2 | NM_134261.2:1715 | −2.57 | 0.03591525 |
| MASP2 | NM_139208.1 | NM_139208.1:330 | −1.65 | 0.03611762 |
| CLU | NM_001831.2 | NM_001831.2:2340 | −1.55 | 0.0369776 |
| KLRB1 | NM_002258.2 | NM_002258.2:85 | −7.43 | 0.03705134 |
| RELA | NM_021975.2 | NM_021975.2:360 | −1.26 | 0.03765981 |
| SLAMF1 | NM_003037.2 | NM_003037.2:580 | 1.82 | 0.03768168 |
| CD8A | NM_001768.5 | NM_001768.5:1320 | −4.49 | 0.0380276 |
| ILIIRA | NM_147162.1 | NM_147162.1:400 | −3.54 | 0.03855863 |
| CD3G | NM_000073.2 | NM_000073.2:404 | −1.44 | 0.03877635 |
| JAK1 | NM_002227.1 | NM_002227.1:285 | −1.84 | 0.4001383 |
| SPN | NM_003123.3 | NM_003123.3:2345 | −1.72 | 0.04035383 |
| CXCR4 | NM_003467.2 | NM_003467.2:1335 | −3.03 | 0.04122601 |
| FAS | NM_000043.3 | NM_000043.3:90 | −2.37 | 0.04150638 |
| IL2 | NM_000586.2 | NM_000586.2:300 | 10.9 | 0.04175377 |
| ITGA1 | NM_181501.1 | NM_181501.1:1875 | −2.75 | 0.04213304 |
| IGFIR | NM_000875.2 | NM_000875.2:455 | −1.94 | 0.0424234 |
| CLEC6A | NM_001007033.1 | NM_001007033.1:342 | −2.83 | 0.04299769 |
| RPS6 | NM_001010.2 | NM_001010.2:171 | −1.36 | 0.04334091 |
| MAPK11 | NM_002751.5 | NM_002751.5:1310 | −1.98 | 0.04344288 |
| REL | NM_002908.2 | NM_002908.2:225 | −2.37 | 0.04382344 |
| EOMES | NM_005442.2 | NM_005442.2:1670 | −6.49 | 0.04442535 |
| KLRG1 | NM_005810.3 | NM_005810.3:65 | −3.52 | 0.04487411 |
| IL2RA | NM_000417.1 | NM_000417.1:1000 | 3.4 | 0.0457568 |
| IFNA17 | NM_021268.2 | NM_021268.2:291 | −3.13 | 0.04595868 |
| SH2D1B | NM_053282.4 | NM_053282.4:545 | −1.44 | 0.04640447 |
| CCL2 | NM_002982.3 | NM_002982.3:123 | 4.01 | 0.04660539 |
| TXNIP | NM_006472.1 | NM_006472.1:255 | −4.07 | 0.04695375 |
| CXCL13 | NM_006419.2 | NM_006419.2:210 | −65.05 | 0.04708191 |
| CASP8 | NM_001228.4 | NM_001228.4:301 | −1.42 | 0.04720592 |
| MTMR14 | NM_022485.3 | NM_022485.3:720 | −1.25 | 0.04798024 |
| MAP3K5 | NM_005923.3 | NM_005923.3:1760 | −1.62 | 0.04838454 |
| ADORA2A | NM_000675.3 | NM_000675.3:1095 | 1.3 | 0.04872028 |
| CCRS | NM_000579.1 | NM_000579.1:2730 | −4.01 | 0.04885927 |

TABLE 16B
Summary of genes whose expression are preferentially regulated in
TCR Vβ-activated T cells compared to OKT3-activated T cells.

| | | Log₂ | |
|---|---|---|---|
| | | Fold | |
| Gene | Description | Change | P-Value |
| LIF | LIF Interleukin 6 Family Cytokine | 4.65 | 0.0119 |
| GZMK | Granzyme K | −3.65 | 0.0468 |
| CD40LG | CD40 Ligand | 3.56 | 0.0082 |
| ENTPD1 | Ectonucleoside Triphosphate | −3.53 | 0.0541 |
| (CD39) | Diphosphohydrolase 1 | | |
| PDCD1 | Programmed Cell Death 1 | 3.19 | 0.0257 |
| TCF7 | Transcription Factor 7 | −3.1 | 0.00634 |
| CXCR5 | Chemokine receptor for CXCL 13 | 3.05 | 0.0337 |
| CD96 | Transmembrane | −2.75 | 0.007 |
| | glycoprotein Ig superfamily | | |
| | receptor, interacts with | | |
| | nectin and nectin-like | | |
| | proteins, including | | |
| | CD155/polio virus receptor | | |
| | (PVR) | | |
| LTA | Lymphotoxin Alpha | 2.67 | 0.0082 |
| HLA-DRB4 | Major Histocompatibility | −2.66 | 0.0377 |
| | Complex, Class II, DR | | |
| | Beta 4 | | |
| CD80 | T cell costimulatory molecule | 2.58 | 0.0425 |
| SIGIRR | Single Ig And TIR Domain Containing | −2.37 | 0.0227 |
| SELL | Selection L | −2.3 | 0.00634 |

### Example 12: Binding Affinity of Affinity Matured Humanized Antibody A-H Antibodies

[1254] This Example describes the evaluation of binding affinity of affinity matured humanized Antibody A-H antibodies to recombinant protein TCRVB 6-5.

[1255] Antibody A-H humanized antibodies were affinity matured. The resulting affinity matured antibodies were tested for their binding affinity to TCRVB 6-5 as described below.

[1256] TCRVB 6-5 at 5 ug/mL was immobilized on a Biotin CAP Series S Sensor Chip to 60 RU. BJM0277 was diluted to 200 nM and then serially diluted two fold. Association was 120 seconds, and dissociation was 300 seconds. This assay was run in 1×HBS-EP+ Buffer pH 7.4 and 25C. The data was fit using a 1:1 binding model.

[1257] TCRVB 6-5 at 5 ug/mL was immobilized on a Biotin CAP Series S Sensor Chip to 60 RU. A-H.45 was diluted to 50 nM and then serially diluted two fold. Association was 120 seconds, and dissociation was 300 seconds. This assay was run in 1×HBS-EP+ Buffer pH 7.4 and 25C. The data was fit using a 1:1 binding model. A-H.45 is an improved yeast clone (TCRvB/CD 19 bispecific) and contains a mutation (G to V) at the last residue in framework 3, just before HCDR3. The affinity is 35-fold greater than the BJM0277 (Table 17).

[1258] TCRVB 6-5 at 5 ug/mL was immobilized on a Biotin CAP Series S Sensor Chip to 60 RU. A-H.52 was diluted to 50 nM and then serially diluted two fold Association was 120 seconds, dissociation was 300 seconds. This assay was run in 1×HBS-EP+ Buffer pH 7.4 and 25C. The data was fit using a 1:1 binding model. A-H.52 is a phage clones and is a monovalent scFv. A-H.52 has two mutations on CDRH1. The affinity of A-H.52 is 20-fold greater than BJM0277 (Table 17).

[1259] TCRVB 6-5 at 5 ug/mL was immobilized on a Biotin CAP Series S Sensor Chip to 60 RU. A-H.53 was diluted to 50 nM and then serially diluted two fold. Association was 120 seconds, dissociation was 300 seconds. This assay was run in 1×HBS-EP+ Buffer pH 7.4 and 25C. The data was fit using a 1:1 binding model. A-H.53 (phage clone) affinity is in the pM range (Table 17). The affinity of A-H.53 is 200-fold greater than BJM0277 (Table 17).

[1260] TCRVB 6-5 at 5 ug/mL was immobilized on a Biotin CAP Series S Sensor Chip to 60 RU. A-H.54 was diluted to 50 nM and then serially diluted two fold. Association was 120 seconds, dissociation was 300 seconds. This assay was run in 1×HBS-EP+ Buffer pH 7.4 and 25C. The data was fit using a 1:1 binding model. A-H.54 (phage clone) affinity is 17-fold greater than BJM0277 (Table 17).

TABLE 17
Summary of affinity maturation of anti-TCRVb antibodies

| Construct | Target: TCRVβ 6-5 |
|---|---|
| BJM0277 | 35 nM |
| A-H.45 | 1.08 Nm |
| A-H.52 | 1.76 nM |
| A-H.53 | 165 pM |
| A-H.54 | 2.22 nM |

### Example 13: Expression and Purification of Antibody Constructs

### Construction of the Plasmids

[1261] The DNA encoding the protein sequences was optimized for expression in Cricetulus griseus, synthesized, and cloned into the peDNA3.4-TOPO (Life Technologies A14697) using Gateway cloning. All constructs contained an Ig Kappa leader sequence METDTLLLWVLLLWVPGSTG (SEQ ID NO: 3288).

### Expression and Purification

[1262] The plasmids were co-transfected into either Expi293 cells (Life Technologies A 14527) or ExpiCHO cells (Life Technologies A29127). Transfections were performed using 1 mg of total DNA for a multispecific construct with a 1:1 heavy chain ratio and 3:2 light chain to heavy chain ratio if applicable. Transfection in Expi293 cells was done using linear 25.000 Da polyethylenimine (PEI, Polysciences Inc 23966) in a 3:1 ratio with the total DNA. The DNA and PEI were each added to 50 mL of OptiMem (Life Technologies 31985088) medium and sterile filtered. The DNA and PEI were combined for 10 minutes and added to the Expi293 cells with a cell density of 1.8-2.8×10⁶ cells/mL and a viability of at least 95%. The ExpiCHO transfection was performed according to the manufacturer's instructions. Expi293 cells were grown in a humidified incubator at 37° C., with 8% CO₂ for 5-7 days after transfection and ExpiCHO cells were grown for 14 days at 32° C., with 5% CO₂. The cells were pelleted by centrifugation at 4500 kg and the supernatant was filtered through a 0.2 μm membrane. Protein A resin (GE 17-1279-03) was added to the filtered supernatant and incubated for 1-3 hours at room temperature. The resin was packed into a column, washed with 3×10 column volumes of Dulbecco's phosphate-buffered saline (DPBS, Life Technologies 14190-144). The bound protein was eluted from the column with 20 mM citrate. 100 mM NaCl, pH 2.9. When necessary, the proteins were further purified using ligand affinity and/or size exclusion chromatography on a Superdex 200 column with a running buffer of DPBS.

### Example 14: Humanization of Anti-TRBV5-5 Antibody Clone Antibody C

[1263] The germline for the mouse anti-TCRvbeta antibody clone Antibody C VH and VL were assigned using IMGT nomenclature, with CDR regions defined by a combined Kabat and Chothia classification, SEQ ID NO: 232 and SEQ ID NO: 233 are the Antibody C VH and VL sequences respectively where the VH germline is mouse IGHV2-6-7*01 and the VL germline is mouse IGKV10-94*02. The method applied to humanize Antibody A described in Example 1 was used to humanize Antibody C. The Antibody C VH was humanized into human IGHV2-26*01, IGHV2-70*04, IGHV4-4*02, IGHV2-5*09, IGHV2-5*08, IGHV4-34*09, IGHV4-59*01, IGHV4-59*07, IGHV4-61*02, IGHV4-38-2*01, IGHV4-31*01, IGHV3-49*04, IGHV3-49*02, IGHV4-4*07, IGHV3-49*05, IGHV4-34*10, IGHV4-28*04, IGHV3-72*01, IGHV3-15*07. IGHV6-1*01, IGHV3-7*01, IGHV4-34*01, IGHV3-33*02, IGHV3-48*02, IGHV3-23*03, IGHV3-21*01, IGHV3-73*01, IGHV3-30*02, IGHV3-7*01, IGHV3-43*01, and IGHV3-53*03 and the Antibody C VL was humanized into human IGKVID-43*01, IGKV1-27*01, IGKV1-17*02, IGKV1-17*01, IGKV1-5*01, IGKV4-1*01, IGKV3-7*02, IGKV3-7*01, IGKV2-29*02, IGKV6D-41*01, IGKV2-28*01, IGKV2-40*01, IGKV3-15*01, IGKV2-24*01, IGKV6-21*01, IGKV2D-26*01, and IGKV2D-26*03.

[1264] SEQ ID NOs: 3040-3089 are the Antibody C humanized heavy chains and SEQ ID NOs: 3000-3039 are the Antibody C humanized light chains (as described in Table 10B).

### Example 15: Humanization of TRBV10-1, TRBV10-2, and TRBV10-3 Antibody Clone Antibody D

[1265] The germline for the mouse anti-TCRvbeta antibody clone Antibody D VH and VL were assigned using IMGT nomenclature, with CDR regions defined by a combined Kabat and Chothia classification, SEQ ID NO: 3183 and SEQ ID NO: 3184 are the Antibody D VH and VL sequences respectively where the VH germline is mouse IGHV5-6*01 and the VL germline is mouse IGKV4-59*01.

[1266] The method applied to humanize Antibody A described in Example 1 was used to humanize Antibody D. The Antibody D VH was humanized into human IGHV3-30*03, IGHV3-30*02, IGHV3-7*01. IGHV3-21*01, IGHV3-23*04, IGHV3-30*15, IGHV3-48*02, IGHV3-53*04, IGHV3-23*03, IGHV3-53*03. IGHV3-53*01, IGHV3-9*01, IGHV3-30*13, IGHV3-20*01, IGHV3-43D*03, IGHV3-43*02, IGHV3-43*01, IGHV3-53*02, IGHV3-13*01, IGHV3-38-3*01, IGHV3-9*03, IGHV3-64D*06, IGHV3-33*02, IGHV3-11*03, IGHV3-64*02, IGHV3-64*01, IGHV3-64*03, IGHV3-7*01, IGHV3-35*01, IGHV3-13*02, IGHV3-38*02, and IGHV3-38*01 and the Antibody D VL was humanized into human IGKV3-11*01, IGKV1-13*02, IGKV1-9*01, IGKV6-21*01, IGKV1D-43*01, IGKV3-11*01, IGKV3D-11*02, IGKV1-17*03, IGKV3D-20*01, IGKV3-20*01, IGKV1D-16*01, IGKV4-1*01, IGKV2-28*01, IGKV2-40*01, IGKV2-29*02, IGKV2-29*01, IGKV1D-42*01, IGKV2-24*01, and IGKV5-2*01, SEQ ID NOs: 3225-3274 are the Antibody D humanized heavy chains and SEQ ID NOs: 3185-3224 are the Antibody D humanized light chains (as described in Table 12).

### Example 16: Humanization of TRBV5-5 and TRBV5-6 Antibody Clone Antibody E

[1267] The germline for the mouse anti-TCRβ antibody clone Antibody E VH and VL were assigned using IMGT nomenclature, with CDR regions defined by a combined Kabat and Chothia classification, SEQ ID NO: 3091 and SEQ ID NO: 3092 are the Antibody E VH and VL sequences respectively where the VH germline is mouse IGHV1-82*01 and the VL germline is mouse IGKV3-5*01.

[1268] The method applied to humanize Antibody A described in Example 1 was used to humanize Antibody E. The Antibody E VH was humanized into human IGHV1-69*08, IGHV1-3*02, IGHV1-18*03. IGHV1-3*01, IGHV1-18*01, IGHV1-2*06, IGHV1-2*01, IGHV1-2*06, IGHV1-8*01, IGHV7-4-1*02. IGHV1-58*02, IGHV5-51*01, IGHV7-4-1*04, IGHV7-81*01, IGHV5-51*04, IGHV5-51*01, IGHV1-45*03, IGHV3-49*04, IGHV3-49*02, IGHV3-49*05, IGHV4-4*02, IGHV3-49*05, IGHV3-73*01, IGHV4-4*02, IGHV3-15*07, IGHV3-15*02, IGHV3-72*01, IGHV4-59*07, IGHV4-31*01, IGHV4-31*02, IGHV3-30*15, IGHV3-21*01, IGHV3-7*01, IGHV4-28*01, IGHV4-28*02, IGHV3-30*08, IGHV3-30*05, and IGHV3-30*01 and the Antibody E VL was humanized into human IGKV4-1*01, IGKV3-11*01, IGKV3-20*02, IGKV3-11*01, IGKV1-13*02, IGKV3D-11*01, IGKV3D-20*02, IGKV1-13*02, IGKV3D-20*01, IGKV1-9*01, IGKV3D-15*03, IGKV3-15*01, IGKV1-5*01, IGKV2D-29*01, IGKV3-7*02, IGKV1-9*01, IGKV2-28*01, IGKV2-40*01, IGKV2D-29*02, IGKV3-7*01, IGKV2-30*01, IGKV2-24*01, IGKV6D-41*01, IGKVID-42*01, IGKV2D-26*01, IGKV2D-26*03, and IGKV5-2*01, SEQ ID NOs: 3133-3182 are the Antibody E humanized heavy chains and SEQ ID NOs: 3093-3132 are the Antibody E humanized light chains (as described in Table 11).

### Example 17: Kinetics of T Cell Expansion Following TCRβV 6-5 Stimulation

[1269] To assess the kinetics and absolute count of anti-TCRβv 6-5 expanded T cells-either PBMCs or purified T cells were stimulated with plate-immobilized anti-TCRvb 6-5 antibody over 8 days with a T cell-activating antibody at 100 nM. T cell activating antibodies tested included: i) anti-TCRvb 6-5 v1 antibody: ii) anti-TCRvb 6-5 v2; iii) OKT3 (anti-CD3ε antibody): iv) SP34-2 (anti-CD3s antibody); and v) IgG1 N297A (isotype control). Cell pellets were collected each day and stained for CD3, CD4, CD8 and TCRvb 6-5 for flow analysis.

[1270] TCRvb 6-5+ T cell expansion over 8 days using anti-TCRvb 6-5 v1 is shown in FIG. 31, as assessed by flow cytometry. The data is for a single representative donor; and similar results were seen with PBMCs from two other independent donors. FIG. 33 further shows the specific expansion of TCRvb 6-5+CD4+ T cells and TCRvb 6-5+ CD8+ T cells by TCRvb 6-5 v1. In contrast, there was no specific TCRvb 6-5+ T-cell expansion by OKT3 (FIG. 32; FIG. 34).

[1271] FIGS. 35A and 35B show selective expansion of TCRβV 6-5+ T cells in human PBMCs (FIG. 35A) and purified T cells (FIG. 35B).

[1272] FIGS. 36A-38 shows that anti-TCRβV and anti-CD3ε antibodies expand T cells in a PBMC culture (FIGS. 36A and 36B) or a purified T cell culture (FIGS. 37A and 37B)) to comparable levels after 8 days, as measured by both relative count of TCRVB 6-5+ T cells (FIGS. 36A-37B) and relative count of total CD3+ T cells (FIGS. 36A-38).

### Example 18: Activated TCRvb 6-5+ T Cells Exert Cytolytic Function

[1273] To assess the ability of T cells activated/expanded with anti-TCRVβ to mediate tumor cell lysis-purified T cells were stimulated over 6 days with an immobilized T cell-activating antibody at 100 nM. T cell activating antibodies tested included: i) TCRvb 6-5 v1 antibody: ii) OKT3 (anti-CD3ε antibody); or iii) IgG1 N297A (isotype control). Target cells (RPMI-8226 cells) were added on each day and incubated with the activated T cells at an initial effector T cell:target (E:T) cell ratio of 5:1 for 48 hours. Quantification of target cell lysis was measured using CFSE/CD138 and DRAQ7 FACS staining. Three different T cell donors were used (donor 6769, donor 9880, donor 54111). The data shows that the kinetics of target cell lysis by TCRVb 6-5 v1 activated T cells correlates with the expansion of TCRvb 6-5+ T cells (FIG. 39).

[1274] To further assess target cell lysis OKT3 or TCRvb 6-5 v1 antibodies were immobilized (plate-coated) with a ½ log serial dilution from a top dose concentration of 100 nM for purified T-cell (pan CD3 isolated) activation. The purified T-cells were stimulated with the activation plate for 0 (i.e. without antibody preactivation) to 4 (i.e. with antibody preactivation) days prior to addition of the target cells. Target cells (RPM18226) were added to the activation plate (at an initial E:T cell ratio, 5:1) for up to 6-days (i.e. for plate 0, E:T coculture for 6-days, and for plate 4, E:T coculture for 2-days) followed by target cell lysis quantification via CFSE/CD138 and DRAQ7 FACS staining. The data shows that without T-cell preactivation, approximately 3% of Vb cells were able to kill target cells at day 6 (at higher concentration) (FIG. 40A); and with T-cell preactivation, approximately 25% of Vb cells were able to kill target cells at day 6 (the killing curve is shifted to the left) (FIG. 40B). TCRvb 6-5 v1 activated T cells exhibit comparable maximal target cell lysis when compared to anti-CD3ε when T cells are preactivated for 4 days (FIG. 41). At 100 nM, TCRvb 6-5 v1 activation shows comparable killing of target cells to anti-CD3ε activation (FIG. 42) (preactivation between 4-6 days depending on the donor and the cultures cultured for 48 h in presence of target cells).

### Example 19: Assessing TCRvb Downregulation/Internalization by Anti-TCRvb 6-5 Antibody

[1275] To assess the effect anti-TCRvb 6-5 mediated T cell activation has on cell surface expression of TCRvb-purified T cells were stimulated over 8 days with the indicated T cell-activating antibody at 100 nM (plate bound). T cell activating antibodies included: i) anti-TCRvb 6-5 v1 antibody; or ii) SP34-2 (anti-CD3ε antibody). Cell pellets were collected each day and stained for CD3, CD4, CD8 and TCRβV 6-5 for flow cytometry analysis. A total of three donors were tested, each showing similar results.

[1276] The results show that both anti-CD3ε and anti-TCRvb antibodies activated CD4+ T cells (FIG. 43) and activated CD8+ T cells (FIG. 44) display reduced CD3ε cell surface expression: whereas TCRvb 6-5 cell surface expression on CD4+ T cells (FIG. 45) and CD8+ T cells (FIG. 46) remains detectable post T cell activation. The results show that the CD3ε subunit is downregulated/internalized in T cells activated by either anti-CD3ε or anti-TCRvb antibodies: while TCRvb 6-5 remains detectable post T cell activation. Additionally, CD4 and CD8 staining did not show any signs of downmodulation of these receptors by either antibody.

### Example 20: Cynomolgus Cross Reactivity of Anti-TCRβV Antibodies

[1277] To assess the cross reactivity of anti-TCRβV antibodies for cynomolgus TCRβV clonotype—fresh and cryopreserved cynomolgus PBMCs were cultured in complete media (RPMI with 10% FBS) in tissue culture treated flat bottom 96 well plates precoated with anti-TCRβV 6-5 v1 or anti-CD3ζ antibodies at 100 nM concentration. Negative control or unstimulated wells received PBS alone. TCRβV 6-5 expression was evaluated after 6 days in culture using CytoFlex flow cytometer (Beckmann Coulter) and imaged. Two donors samples were used: Donor DW8N—fresh PBMC sample, male, age 8, weight 7.9 kgs (data presented in FIG. 47A): Donor G709-cryopreserved sample, male, age 6, weight 4.7 kgs (data presented in FIG. 47B). The data show that cynomolgus T cells were activated and expanded by the anti-TCRβV 6-5 v1 (FIG. 47A and FIG. 47B). Fresh cynomolgus PBMCs from donor DW8N that had shown TCRvb 6-5 expansion were cryopreserved and after a week in cryopreservation, the cells were thawed and stimulated using anti-CD3ξ and anti-TCRvb 6-5 v1 for seven days. Cluster formation and expansion were both reproducible as shown in FIG. 48.

### Example 21: No Activation of γδ T Cells by Anti-TCRβV Antibodies

[1278] To determine if anti-TCRvb antibodies are able to activate γδ T cells-γδ T cells were purified from human PBMCs via magnetic bead separation. γδ T cells were immobilized on plate-coated anti-CD3a (SP34-2) or anti-TCRvb 6-5 (anti-TCRvb 6-5 v1) antibodies for 24 hours and analyzed for CD69 and CD25 expression by flow cytometry. Supernatants were collected post activation 2, 5, and 7 days, and analyzed for cytokines using Meso Scale Discovery (MSD) assay. FACS gating/staining on PBMCs was conducted prior to γδ T cell purification showing that γδ T cells are v 6-5 negative (Donor 12657-gating for γδ T and TCRvβ 6-5 based on FMO) (FIG. 49). FACS gating/staining on purified γδ T cell was conducted showing that purified γδ T cells are vβ 6-5 negative (Donor 12657-gating for γδ T and TCRvβ 6-5 based on FMO) (FIG. 50). As shown in FIG. 51, the anti-TCR Vβ 6-5 antibody (anti-TCRvb 6-5 v1) did not activate γδ T cells; while the anti-CD3ε antibody (SP34-2) did. The cytokine analysis showed that anti-TCRβV 6-5 v1 does not induce cytokine release by γδ T cells, cytokines analyzed include IFNγ, TNFα, IL-2, IL-17A, IL-1α, IL-1β, IL-6, and IL-10 (FIG. 52A-56H).

### Example 22: Polyclonal T Cell Expansion by Anti-TCRVβ Antibodies

[1279] To assess the ability of anti-TCRVβ antibodies to induce polyclonal T cell expansion-human CD3+ T cells were isolated using magnetic-bead separation (negative selection) and activated with immobilized (plate-coated) anti-TCRβV 6-5 v1 at 100 DM for 6 days. The expanded T cell population was washed and lysed using Takara single cell lysis buffer for SMART(er) TCR cDNA synthesis and sequencing. TCR sequencing was carried out and absolute counts and relative representation of the different TCR alpha V and J segments and TCR beta V, D, and J segments were determined, as well as the different variants of each of them that arise from Artemis/TdT activity during the V (D) J recombination, and that correspond to unique clones of T cells. FIG. 53 shows the relative representations of all TCR alpha V segments (TRAV group of genes) and their variants (top), all TCR beta V segment 6-5 variants (TRBV6-5 gene) (bottom left), and all TCR beta V segments and variants excluding 6-5 (bottom right). The data show that the anti-TCRVβ antibody stimulation does not induce proliferation of specific T cell clones within the TRBV6-5 positive population, as the relative difference in clonal representation in that population is comparable to the TRBV6-5 negative population as well as total TRAV usage.

### Example 23: T Cells Expanded by Anti-TCRβV Represent a Novel Subset of Recently Activated Effector T Cells

[1280] To assess the phenotype of anti-TCRβV expanded T cells-purified T cells were stimulated with solid-phase anti-TCRβV antibody over 8 days with the indicated T cell-activating antibody at 100 nM: i) anti-TCRvb 6-5 v1 antibody; ii) anti-TCRvb 6-5 v2; iii) OKT3 (anti-CD3ε antibody); or iv) IgG1 N297A (isotype control). T-cell subsets were identified by FACS staining for specific surface markers for: Naive T cell (CD4/CD8+, CD45RA+, CCR7+); T stem cell memory (TSCM; CD4/CD8+, CD95+, CD45RA+, CCR7+): T central memory (TCM; CD4/CD8+, CD95+, CD45RA−, CCR7+); T effector memory (TEM; CD4/CD8+, CD95+, CD45RA−, CCR7−); T effector memory re-expressing CD45RA (TEMRA; CD4/CD8+, CD95+, CD45RA+, CCR7−); and CD27, CD28, 4-1BB, OX40, and ICOS. Data is representative of more than 5 independent experiments.

[1281] The data shows that CD4+ T cells expanded by anti-TCR Vβ antibody (FIG. 54A), but not OKT3 (FIG. 54B), share phenotypic markers with the TEMRA subset. Likewise, the data shows that CD4+ T cells expanded by anti-TCR Vβ antibody (FIG. 55A), but not OKT3 (FIG. 55B), share phenotypic markers with the T_{EMRA} subset. Further analysis of PD1 expression showed anti-TCR Vβ activated CD4+ T cells (FIG. 56A) and CD8+ T cells (FIG. 56B) display increased PD1 expression relative to anti-CD3ε activated CD4+ T cells (FIG. 56A) and CD8+ T cells (FIG. 56B). These anti-TCR Vβ activated CD4+ T cells (FIG. 57A) (PD-1+ TEMRA phenotype) and anti-TCR Vβ activated CD8+ T cells (FIG. 57B) (PD-1+ TEMRA phenotype) show Ki-67 enriched phenotype relative to anti-CD3ε activated CD4+ T cells (FIG. 57A) and CD8+ T cells (FIG. 57B).

[1282] Further analysis of CD57 expression showed anti-TCR Vβ activated CD8+ T cells (FIG. 58A) do not display increased CD57 expression relative to anti-CD3ε activated CD8+ T cells (FIG. 58B). Likewise, analysis of CD27 and CD28 expression showed anti-TCR Vβ activated CD4+ T cells (FIG. 59 top) and anti-TCR Vβ activated CD8+ T cells (FIG. 59 bottom) do not display increased CD27 and CD28 expression relative to anti-CD3ε activated CD8+ T cells (FIG. 59).

[1283] Further analysis of OX40, 41BB, and ICOS expression showed anti-TCR Vβ activated CD4+ T cells (FIG. 60 top) and anti-TCR Vβ activated CD8+ T cells (FIG. 60 bottom) display increased OX40, 41BB, and ICOS expression relative to anti-CD3ε activated CD8+ T cells (FIG. 60).

[1284] The TEMRA like phenotype of anti-TCR Vβ antibody expanded T cells was further analyzed using time lapse flow cytometry to evaluate expression of CD45RA and CCR7 at different time points post activation. Isolated human T-cells were activated with immobilized (plate-coated) anti-CD3ε or anti-TCR Vβ at 100 nM for between 1-8-days. After each (1, 2, 3, 4, 5, 6, 8-) day activation, T-cell subsets were identified by FACS staining for surface markers for Naïve/TSCM T cell (CD4+/CD8+, CD45RA+, CCR7+), T central memory (TCM; CD4+/CD8+, CD95+, CD45RA−, CCR7+), T effector memory (TEM; CD4+/CD8+, CD95+, CD45RA−, CCR7−), and T effector memory re-expressing CD45RA (TEMRA; CD4+/CD8+, CD95+, CD45RA+, CCR7−). TCRβV+ T-cells are identified by TCR Vβ+ staining. FACS stained samples were analyzed by flow cytometry analysis. Data shown a representative for CD4+ T-cells from 1 of 3 donors.

[1285] FIG. 61 shows a series of FACS plots showing the percentage of CD3+ (CD4 gated) TCRβV 6-5+ T cells 1, 2, 3, 4, 5, 6, and 8 days port activation with BCMA and the anti-TCR Vβ antibody anti-TCR Vβ 6-5 v1. Analysis of the percentage of CD4+ T cells expanded using isotype control (IgG1 N297A), anti-TCRβV (anti-TCR Vβ 6-5 v1), or anti-CD3ε (OKT3) antibodies on day 0 post activation (FIG. 62A), day 1 post activation (FIG. 62B), day 2 post activation (FIG. 62C), day 3 post activation (FIG. 62D), day 4 post activation (FIG. 62E), day 5 post activation (FIG. 62F), day 6 post activation (FIG. 62G), and day 8 post activation (FIG. 62H). The percentage of TEMRA like T cells expressing both CD45RA and CCR7 shows an increase in the population of TEMRA like cells in the CD4+ TCR Vβ 6-5+ T cell cultures expanded with the anti-TCR Vβ 6-5 v1 antibody compared to those expanded with the OKT3 antibody. Similar results were seen with CD8+ T cells. The results further show that purified human T-cells activated by anti-TCRβV 6-5 directly differentiates to TEMRA subsets and proliferate when compared to purified T-cells activated by anti-CD3ε (OKT3).

[1286] In summary, the data shows anti-TCRβV antibodies activated and expanded T cells represent a novel subset of recently activated effector T cells which share phenotypic markers with T_{EMRA}. This is in contrast to anti-CD3e-expanded T cells which differentiated into T_{CM} and T_{EM}, TCRβV expanded T cells are highly proliferative and do not upregulate the senescent marker CD57 OX40, 4-1BB, and ICOS are upregulated on anti-TCRβV activated T cells.

### Example 24: Metabolic State of αTCRβV Activated T Cells

[1287] To evaluate the metabolic phenotype of T cells activated with αTCRβV antibodies-naïve T cells from PBMCs were stimulated and expanded for 5 days with plate-bound anti-CD3 antibody (OKT3) or anti-TCRβV antibody (anti-TCRβV 6-5 v1 antibody). Activated T cells were then rested in IL-2 containing media for 2 days, before they were cryopreserved. Prior to assay setup, cells were thawed and re-stimulated for 3 days with plate-bound anti-CD3 Ab (clone OKT3) or anti-TCRβV antibody (anti-TCRβV 6-5 v1 antibody), respectively. Equal numbers of live cells were plated on a Seahorse cartridge, and the Real-Time ATP Rate Assay was performed according to manufacturer's instructions. The data showed that ATP production from glycolysis (FIG. 63A) oxidative phosphorylation (FIG. 63B) in T cells from 3 donors (representative results from a single donor presented in FIG. 63A-67B) activated with the anti-TCRβV 6-5 v1 antibody increased compared to T cells activated with the OKT3 antibody (3-fold increase in ATP production was observed on average); and one donor showed equal levels of ATP production in anti-TCRβV 6-5 v1 and OKT3 Ab stimulated cells (data not shown).

[1288] The increased mitochondrial respiration in T cells activated with anti-TCRβV 6-5 v1 antibody compared to T cells activated with the OKT3 antibody is further shown in FIG. 64, which shows the oxygen consumption rate (OCR) of T cells from about 0 to 75 minutes activated with the indicated antibody. Data in FIG. 63 is from a single donor; a second donor tested showed equal levels of ATP production in anti-TCRβV 6-5 v1 and OKT3 Ab stimulated cells (data not shown). FIGS. 65A-65C show the oxygen consumption rate (OCR) of T cells activated with the indicated antibody during basal respiration (FIG. 65A), maximal respiration (FIG. 65B), and spare respiratory capacity (FIG. 65C). Cells were plated in media containing glucose and glutamine to measure basal OCR. FCCP (ETC accelerator) was added to the cell culture medium to determine maximum respiratory capacity/max OCR. Antimycin A & Rotenone (ETC inhibitor) were added to the cell culture medium to determine spare respiratory capacity and non-mitochondrial oxygen consumption. The data presented in FIGS. 65A-65C α-TCRβV 6-5 v1 activated T cells had significantly increased basal respiration, maximal respiration, and spare respiratory capacity compared to α-CD3 (OKT3) activated T cells (data from a single donor). A second donor was tested which showed equal levels of ATP production in anti-TCRβV 6-5 v1 and OKT3 Ab stimulated cells (data not shown).FIG. 65D indicates the areas of basal respiration and maximal respiration as shown in FIG. 64A and FIG. 64B, respectively.

[1289] In order to determine if the observed increase in metabolism due to differences in T cell stimulation, or is it intrinsic to the differentiation stage of T cells activated with anti-TCRβV antibodies TCRβV 6-5+ T cells were expanded for 5 days with plate-bound anti-TCRβV 6-5 vI Ab. Cells were then rested in IL-2 containing media for 2 days and cryopreserved. Upon thawing, cells were re-stimulated with anti-TCRβV 6-5 v1 for 3 days. Cells were then counted and equal numbers of live cells were re-seeded and stimulated with plate-bound anti-CD3 Ab (clone OKT3) or anti-TCRβV 6-5 v1, respectively, for 24 hours. Equal numbers of live cells were plated on the Seahorse cartridge and the Real-Time ATP Rate Assay was performed.

[1290] The results show that ATP production by glycolysis (FIG. 66A) and oxidative phosphorylation (FIG. 66B) by T cells activated with anti-TCRβV 6-5 v1 is significantly increased upon re-stimulation with α-CD3 antibody OKT3 versus α-TCRβV 6-5 v1 antibody. The observed increase in metabolism of T cells activated with anti-TCRβV 6-5 v1 appears to be due to intrinsic differences upon differentiation into these cells. T cells activated with anti-TCRβV 6-5 v1 have an increased metabolism compared to CD3-activated T cells, which can be further enhanced with strong T cell stimulation via OKT3.

[1291] In summary, the results show that T cells activated with anti-TCRβV antibodies have a metabolic memory phenotype. The cells are not metabolically exhausted, because exhausted T cells have a decreased metabolism, α-TCRβV 6-5 v1-stimulation induces a T cell differentiation stage, which is highly metabolically active, indicative of an effector memory phenotype. This metabolic phenotype is maintained when these cells are re-stimulated with other T cell engagers (OKT3).

### Example 25: Assessment of CRS with Anti-CD3e Antibody Compared to Anti-TCRβV Antibody

[1292] To determine CRS effect of a low affinity (Teneobio) anti-CD3e antibody, a cytokine release assay (CRA) with PBMCs was used Briefly. PBMCs from two donors were stimulated with plate-coated antibodies; anti-TCRvb6-5 v2, anti-CD3e (SP34) or Teneobio's anti-CD3e antibody. T cell activating antibodies were tested at 100 nM, the highest concentration previously shown not to induce CRS cytokines in this assay. Supernatants were collected at day 1, 3, 5 and 7. Cytokine secretion measurement (IFN-g, IL-10, IL-15, IL-17A, IL-1a, IL-1b, IL-2, IL-4, IL-6 and TNF-a) was detected using MSD analysis. The data show results from two donors.

[1293] FIGS. 67A-67F show that a reduced affinity anti CD3e antibody (TeneoBio) induces expression of IFNgamma, TNFalpha, IL-1a, IL-1b, IL-6 (CRS and neurotoxicity associated cytokines) similar to the SP34-2 anti CD3e antibody. In contrast, the anti-TCRvb6-5 v2 as described herein does not induce CRS or neurotoxicity associated cytokines.

[1294] In summary the data shows that Tenebio's anti-CD3e antibody induces cytokines associated with CRS and neurotoxicty in this highly sensitive PBMC CRA. Thus, Tenebio's anti-CD3e antibody has potential to induce CRS and NT as seen with SP34-based T cell-redirecting bispecific molecules. The anti-TCRvb6-5 as described herein does not induce CRS- and NT-associated cytokines in this assay, suggesting that in some embodiments, TCRvb6-5 based antibodies may be amenable to administration at higher doses and avoid MABEL (minimum anticipated biologic effect level) dosing regimen required for current CD3e-based bispecific molecules.

### Example 26: Anti-TCRβV Stimulated PBMC Mediated Stimulation of NK Cell Expansion

[1295] To assess whether anti-TCRβV stimulated PBMCs mediate expansion of NK cells in vitro-human PBMCs were stimulated with 100 nM of plate-coated anti-TCRβV 6-5 v1 anti-CD3ε (OKT3 and SP34-2) for up to 7 days. NK cells were identified via FACS staining for CD3−/CD56+/CD16+/NKp46+ populations. NK cell count was determined by a constant μl sample (presented as relative count for each donor). NK cell-mediated target cell lysis was determined 6-days post stimulation, in which PBMCs were harvested and co-cultured with K562 target cells for 4 hours to determine cell killing, via DRAQ7 viability FACS staining.

[1296] The results show that anti-TCRβV stimulation increases NK cell numbers compared to OKT3 stimulation (FIG. 68; FIG. 69). FACS CFSE staining further shows NK cell proliferation (FIG. 70). FIG. 71 and FIG. 72 show NK cell mediated lysis of target K562 cells. In summary, anti-TCRβV 6-5 antibody induces expansion of NK cells in PBMC; and this effect is unlikely to be mediated through the FcR on NK cells as anti-CD3ε antibodies did not expand NK cells. Expanded NK cells by anti-TCRβV 6-5 v1 mediate potent target cell (K562) lysis in vitro.

[1297] In addition to the experiments conducted above using the anti-TCRβV 6-5 v1 antibody, similar experiments were carried out using anti-TCRβV antibodies that recognize different clonotypes. In one experiment, the anti-TCRβV 12 antibodies; anti-TCRvβ 12-3/4 v1, anti-TCRvβ 12-3/4 v2, and anti-TCRvβ 12-3/4 v3 were used to activate/expand PBMCs using solid-phase stimulated (plate-coated) with the indicated T cell-activating antibody at 100 nM for 6 days as described above. Flow analysis was performed for NK cells using NKp46 and CD56 (CD3 negative). Data was generated from 3 donors and representative of 1 independent experiments.

[1298] Activation/expansion of the PBMC's with isotype control or the anti-CD3ε antibody OKT3 or SP34-2 did not induce expansion of NK cells (FIG. 73: FIG. 75). However, activation/expansion of PBMCs with anti-TCRvβ 12-3/4 v1 (FIG. 74), anti-TCRvβ 12-3/4 v2 (FIG. 74), and anti-TCRvβ 12-3/4 v3 (FIG. 75) all induced NK cell expansion. In summary, the data shows that anti-TCRvb 12 antibodies are able to induce indirect expansion of NK cells from PBMC cultures in vitro.

### Example 27: Concentration Response to Anti-TCRβV Stimulation In Vitro

[1299] Human PBMCs were solid-phase stimulated (plate-coated) with the indicated T cell-activating antibody at the indicated different concentrations: i) anti-TCRvb 6-5 v1 antibody: ii) OKT3 (anti-CD3a antibody); or iii) SP34-2 (anti-CD3ε antibody). Supernatant were collected on day 1, day 3 and day 5 and cytokines quantified by using Meso Scale Discovery (MSD) assay. The production of cytokines IFNγ (FIG. 76), IL-2 (FIG. 77), IL-15 (FIG. 78), IL-1β (FIG. 79), IL-6 (FIG. 80), and IL-10 (FIG. 81) was analyzed. The results indicate that the lack of CRS associated cytokine induction by T cells activated with an anti-TCRvb is not a result of inhibition or toxicity due to high antibody concentrations.

### Example 28: T Cells Activated by Anti-TCRβV Antibodies have a Distinct Cytokine Release Profile Compared to T Cell Activated with Anti-CD3 Antibodies

[1300] To assess the cytokine release profile of T cells activated/expanded using anti-TCRβV antibodies as compared to anti-CD3ε antibodies-PBMCs were cultured in cell culture plates coated with the immobilized anti-TCRβV antibody anti-TCRβV 6-5 v1 or an anti-CD3ε antibody, either OKT3 or SP37-2. The cells were cultured for 1-8 days, the supernatant collected, and cytokines analyzed using Meso Scale Discovery (MSD) assay. T cells samples from numerous different human donors were tested.

[1301] FIG. 82 shows a summary of data from 17 donors. The highest overall cytokine secretion from time points (day 3 and beyond) was used for further analysis. Each data point was normalized against the highest secretion for each donor and showed as relative % of highest (at a confidence interval of 0.95 percentile). The data shows that T cells activated/expanded with an anti-TCRβV antibody as compared to anti-CD3ε antibody release less IFNγ, TNFα, IL-1β, IL-4, IL-6, IL10, and IL-17; while releasing an increased amount of IL-2 (FIG. 82).

[1302] A series of experiments using the methods previously described, but varying the culture period were conducted with PBMCs from different donors. In one experiment, PBMCs from four different donors were cultured in plates coated with immobilized anti-TCRβV antibody anti-TCRβV 6-5 v1 or an anti-CD3ε antibody, either OKT3 or SP37-2 for 1-6 days. The data confirms that T cells activated/expanded with an anti-TCRβV antibody as compared to anti-CD3ε antibody release lower levels of IFNγ (FIG. 83A), IL-1β (FIG. 83B), IL-4 (FIG. 83C), IL-6 (FIG. 83D), IL10 (FIG. 83E), and TNFα (FIG. 83F); and higher levels of IL-2 (FIG. 83G).

[1303] In a second experiment, PBMCs from six different donors were cultured in plates coated with immobilized anti-TCRβV antibody, either anti-TCRβV 6-5 v1 or anti-TCRβV 6-5 v1; or an anti-CD3ε antibody, either OKT3 or SP37-2 for 1-6 days, or isotype control. The data confirms that T cells activated/expanded with an anti-TCRβV antibody as compared to anti-CD3ε antibody release lower levels of IFNγ (FIG. 84A), IL-1β (FIG. 84B), IL-4 (FIG. 84C), IL-6 (FIG. 84D), IL 10 (FIG. 84E), and TNFα (FIG. 84F); and higher levels of IL-2 (FIG. 84G).

[1304] In a third experiments, PBMCs from three different donors were cultured in plates coated with immobilized anti-TCRβV antibody, either anti-TCRβV 6-5 v1 or anti-TCRβV 6-5 v1; or an anti-CD3E antibody, either OKT3 or SP37-2 for 1-8 days, or isotype control. The data confirms that T cells activated/expanded with an anti-TCRβV antibody as compared to anti-CD3ε antibody release lower levels of IFNγ (FIG. 85A), IL-1β (FIG. 85B), IL-4 (FIG. 85C), IL-6 (FIG. 85D), IL10 (FIG. 85E), and TNFα (FIG. 85F); and higher levels of IL-2 (FIG. 85G).

[1305] In a fourth experiments. PBMCs from two different donors were cultured in plates coated with immobilized anti-TCRβV antibody, either anti-TCRβV 6-5 v1 or anti-TCRβV 6-5 v1; or an anti-CD3ε antibody, either OKT3 or SP37-2 for 2-7 days, or isotype control. The data confirms that T cells activated/expanded with an anti-TCRβV antibody as compared to anti-CD3ε antibody release lower levels of IL-17A (FIG. 86A). In a fifth experiments, PBMCs from four different donors were cultured in plates coated with immobilized anti-TCRβV antibody, either anti-TCRβV 6-5 v1 or anti-TCRβV 6-5 v1; or an anti-CD3ε antibody, either OKT3 or SP37-2 for 2-8 days, or isotype control. The data confirms that T cells activated/expanded with an anti-TCRβV antibody as compared to anti-CD3ε antibody release lower levels of IL-17A (FIG. 86B). In a sixth experiments, PBMCs from two different donors were cultured in plates coated with immobilized anti-TCRβV antibody, either anti-TCRβV 6-5 v1 or anti-TCRβV 6-5 v1; or an anti-CD3ε antibody, either OKT3 or SP37-2 for 2-7 days, or isotype control. The data confirms that T cells activated/expanded with an anti-TCRβV antibody as compared to anti-CD3ε antibody release lower levels of IL-17A (FIG. 86C). In a seventh experiments, PBMCs from two different donors were cultured in plates coated with immobilized anti-TCRβV antibody, either anti-TCRβV 6-5 v1 or anti-TCRβV 6-5 v1; or an anti-CD3ε antibody, either OKT3 or SP37-2 for 2-7 days, or isotype control. The data confirms that T cells activated/expanded with an anti-TCRβV antibody as compared to anti-CD3ε antibody release lower levels of IL-17A (FIG. 86D).

[1306] A series of similar experiments were conducted using the TCRβV antibody anti-TCRβV 6-5 v1 or anti-TCRvb 12-3/4 v1 to further assess the cytokine release profile of T cells activated/expanded using anti-TCRβV antibodies as compared to anti-CD3ε antibodies. As described above, PBMCs were cultured in cell culture plates coated with the immobilized anti-TCRβV antibody, anti-TCRβV 6-5 v1 or anti-TCRvb 12-3/4 v1; or an anti-CD3ε antibody, either OKT3 or SP37-2; isotype control; or anti-TCRβV 6-5 v1 in combination with. The cells were cultured for 1-8 days, the supernatant collected, and cytokines analyzed using Meso Scale Discovery (MSD) assay. Data generated from 2 donors and representative of 2 independent experiments.

[1307] The data confirmed that T cells activated/expanded by either anti-TCRβV antibody, anti-TCRβV 6-5 v1 or anti-TCRvb 12-3/4 v1, as compared to either anti-CD3ε antibody (OKT3 or SP37-2) secreted a lower level of IFNγ (FIG. 87A), IL-1β (FIG. 87B), IL-4 (FIG. 87C), IL-6 (FIG. 87D), IL10 (FIG. 87E). TNFα (FIG. 87F); and higher levels of IL-2 (FIG. 87G). Secretion of IL-12p70 (FIG. 87H), IL-13 (FIG. 87I), IL-8 (FIG. 87J), Exotaxin (FIG. 87K), Exotaxin-3 (FIG. 87L), IL-8 (FIG. 87M), IP-10 (FIG. 87N), MCP-1 (FIG. 87O). MCP-4 (FIG. 87P), MDC (FIG. 87Q), MIP-1a (FIG. 87R), MIP-1b (FIG. 87S), TARC (FIG. 87T), GMCSF (FIG. 87U), IL-12-23p40 (FIG. 87V), IL-15 (FIG. 87W), IL-1β (FIG. 87X), IL-17a (FIG. 87Y), IL-1a (FIG. 87Z), IL-5 (FIG. 87AA), IL-7 (FIG. 87BB), TNF-β (FIG. 87CC), and VEGF (FIG. 87DD), were also tested.

[1308] In addition to determining the cytokine profile of T cells activated with the &TCRβV antibodies αTCRβV 6-5 v1 and αTCRβV 6-5 v2 (described above); the assays were conducted with additional TCRβV antibodies recognizing different clonotypes.

[1309] In one series of experiments antibodies tested included anti-TCRvb 12-3/4 v1, anti-TCRvb 10, and anti-TCRvb 5. Per the protocol described above, human PBMCs were solid-phase stimulated (plate-coated) with the indicated T cell-activating antibody (anti-TCRvb 12-3/4 v1, anti-TCRvb 10, anti-TCRvb 5, or the anti-CD3ε antibody SP34) at 100 nM. Supernatant were collected on day 1 to day 8; and cytokines were quantified using Meso Scale Discovery (MSD) assay FIG. 88 provides a graphical representation of sequences between the different clonotypes, highlighting the four subfamilies tested in this series of experiments. PBMCs activated/expanded with the anti-TCRvb 12-3/4 v1 antibody (FIG. 89A), anti-TCRvb 10 antibody (FIG. 89B), or anti-TCRvb antibody (FIG. 89C) exhibited lower levels of secretion of cytokines associated with cytokine release syndrome, including IFNγ, TNFα, IL-1β, IL-2, IL-6, and IL-10, as compared to PBMCs activated/expanded with the anti-CD3ε antibody SP34-2.

[1310] In a second series of experiments, antibodies tested included the anti-TCRVβ antibodies: BJ1460, BJ1461, BJ1465, BJ1187, BJM1709; the anti-CD3ε antibody OKT3, and a cell only control. At Day-0 PBMCs from donor 10749 were thawed and counted along with PBMCs from two fresh donors (13836 and 14828). 200,000 PBMCs in 180 μL of X-vivo media/well (1×10e6 cells/mL) was added to a round bottom 96 well plate-one donor for 1/3 of the plate. 20 μL of 10×TCRVβ antibodies at 100 nM or 15 μg/mL were added to the wells of the plate and one triplicate of wells was added with cells only. The pate was kept in a 37° C. incubator with 5% CO₂. The cells were stimulated for 3 days with a selected antibody and 50 μL of supernatant harvested from the plate and stored at −20° C. 50 μL of media was added back to each well and the plate kept in a 37° C., incubator with 5% CO₂. On Day-6 50 uL of supernatant was harvested from each well of the plate and stored at −20° C. The cells from two wells out of the triplicate were combined and media replenished with huIL-2 was added the cell suspension for each donor was transferred into a 12-well plate. The cells were incubated overnight to allow for rest and expansion in IL-2. The cells were subsequently stained for specific Vβ-clones for detection of specific Vβ-clone expansion by FACS analysis. The concentration of cytokines (including IFNγ, IL-10, IL-17A, IL-1α, IL-1β, IL-2, IL-6, and TNFα) in the media were analyzed in the Day-3 and Day-6 supernatant samples using Meso Scale Discovery (MSD) assay. The data confirmed that PBMCs cells activated/expanded using any of the anti-TCRβV antibodies—BJ1460, BJ1461, BJ1465, BJ1187, BJM1709—secreted lower levels of IFNγ (FIG. 90A), IL-10 (FIG. 90B), IL-17A (FIG. 90C), IL-1α (FIG. 90D), IL-1β (FIG. 90E), IL-6 (FIG. 90F), TNFα (FIG. 90G); and higher levels of IL-2 (FIG. 90H). FACS analysis further showed expansion of T cells expressing the indicated TCRVβ clones (FIG. 91).

[1311] In a third series of experiments, antibodies tested included the anti-TCRVβ antibodies: BHM1675, BJM0816, BJ1188, BJ1189, BJ1190; and the anti-CD3ε antibody SP34-2. The indicated antibodies were coated into a 96-well round bottom plate at concentration of 100 nM or 15 μg/mL at 200 μl/well in PBS at 4° C. overnight or at 37° C., for a minimum of 2 hours. The plate was washed the next day with 200 μL of PBS and 0.2 ×10\hat{ }6 PBMCs/well from donors: CTL_123, CTL_323 and CTL_392. Supernatant samples were collected on days 1, 3, 5, and 7. A 10-plex Meso Scale Discovery (MSD) assay was run on the supernatants to determine the concentration of cytokines (including IFNγ, IL-10, IL-17A, IL-1α, IL-1β, IL-6, IL-4, and IL-2). After day 7, cells were pelleted and added to culture medium supplemented with IL-2 for one additional day to allow for expansion. Expansion of T cells expressing TCRVβ clones was analyzed by FACS staining using the same activating antibody followed by a secondary anti-human/mouse FITC antibody. Live/Dead, CD4+ and CD8+ T cells were also stained for using BHM1675, BJM0816, BJ1189 and BJ1190 antibodies. The data confirmed that PBMCs cells activated/expanded using any of the anti-TCRβV antibodies—BHM1675, BJM0816, BJ1188, BJ1189, BJ1190—secreted lower levels of IFNγ (FIG. 92A), IL-10 (FIG. 92B), IL-17A (FIG. 92C), IL-1α (FIG. 92D), IL-1β (FIG. 92E), IL-6 (FIG. 92F), IL-4 (FIG. 92G); and higher levels of IL-2 (FIG. 92H). FACS analysis further showed that TCRVβ sub-clone T-cells are expanded by their respective activation antibody (FIG. 93).

[1312] In a fourth series of experiments, antibodies tested included the anti-TCRVβ antibodies: BJ1538. BJ1539, BJ1558, BJ1559, BHM1709; and the anti-CD3ε antibody OKT3. The indicated antibodies were coated into a 96-well round bottom plate at concentration of 100 nM or 15 μg/mL at 200 μl/well in PBS at 4° C. overnight or at 37° C., for a minimum of 2 hours. The plate was washed the next day with 200 μL of PBS and 0.2 ×10\hat{ }6 PBMCs/well from donors: 10749, 5078 and 15562 (frozen and thawed samples). Supernatant samples were collected on days 3 and 6. A 10-plex Meso Scale Discovery (MSD) assay was run on the superatants to determine the concentration of cytokines (including IFNγ, IL-10, IL-17A, IL-1α, IL-1β, IL-6, IL-4, TNFα, and IL-2). The data confirmed that PBMCs cells activated/expanded using any of the anti-TCRβV antibodies—BJ1538, BJ1539, BJ1558, BJ1559, BHM1709—secreted lower levels of IFNγ (FIG. 94A), IL-10 (FIG. 94B), IL-17A (FIG. 94C), IL-1a (FIG. 94D), IL-1β (FIG. 94E), IL-6 (FIG. 94F), IL-4 (FIG. 94G) TNFα (FIG. 94H); and higher levels of IL-2 (FIG. 94I).

[1313] In summary, the data shows that anti-TCRvb antibodies recognizing different TCRvb subfamilies (or subtypes) have a similar cytokine profile and do not induce cytokines associated with CRS.

### Example 29: Anti-TCRvb does not Activate T Cells without Cross-Linking

[1314] To assess whether bivalent anti-TCRvb antibodies activate T cells without cross-linking-purified T cells from 2 donors were stimulated with anti-TCRvb (TCRvb 6-5 v1) or anti-CD3e (SP34), either plate-coated or in solution. Supernatants were collected at day 1, 3, 5 and 7 post activation. Cytokine secretion was detected using MSD 10 plex kit (IFN-g, IL-10, IL-15, IL-17A, IL-1a, IL-1b, IL-2, IL-4, IL-6 and TNF-a).

[1315] The results show the PBMCs activated/expanded with anti-TCRvb 6-5 v1 antibody in solution do no induce very little IFNγ secretion as compared to PBMCs activated/expanded with anti-TCRvb 6-5 v1 antibody in immobilized (allowing for crosslinking) (FIG. 95A and FIG. 95B). The results show the PBMCs activated/expanded with anti-TCRvb 6-5 v1 antibody in solution do no induce very little or no IL-1b (FIG. 95C), IL-10 (FIG. 95E), IL-15 (FIG. 95F), IL-17A (FIG. 95G), IL-Ja (FIG. 95H), IL-1b (FIG. 95I), IL-2 (FIG. 95J), IL-4 (FIG. 95K), IL-6 (FIG. 95D), and TNF-α (FIG. 95L) secretion. In summary, the data shows that anti-CD3ε activates T cells in solution (without crosslinking); while the anti-TCRvb antibodies does not activate T-cells in solution.

### Example 30: Competition of Binding to TCRVB by Two Anti-TCRVβ 5-5,5-6 Antibodies with Distinct Sequences

[1316] This Example describes epitope competition of two anti-TCRVβ 5-5.5-6 antibodies for binding to their shared TCRVB antigen. The TM23 and MH3-2 antibodies both bind to TCRVβ 5-5.5-6. However, the TM23 and MH3-2 antibodies do not share substantial sequence homology.

[1317] As shown in FIG. 25A-25B, anti-TCRβV antibody molecules as described herein recognize a structurally conserved domain on the TCRBV protein (as denoted by the circled area in FIG. 25A), but have low sequence similarity among themselves. To test whether two anti-TCRVβ 5-5,5-6 antibodies which do not share substantial sequence homology, can compete for binding to the TCRBV antigen, a competition assay was carried out.

[1318] Purified MH3-2 antibody was conjugated to AF647. T cells from two donors were preincubated with 500 nM of the TM23 antibody or left untreated. The T cells were then stained with the MH3-2 antibody conjugated to AF647.

[1319] The results show that preincubation of T cells with the TM23 antibody blocks binding of MH3-2 (FIG. 96 and FIG. 97). The data shows that the TM23 antibody competes for binding with the same epitope as the MH3-2 antibody, despite both antibodies having diverse sequences. This data confirms the observation that anti-TCRβV antibody molecules which have low sequence similarities among themselves, bind and recognize a structurally conserved epitope on the TCRβV protein.

### Example 31: Polyfunctional Strength Index of Anti-TCRVβ 6-5 Antibody Expanded T Cells

[1320] The polyfunctional strength index (PSI) of PBMCs were compared to anti-CD3ε antibody expanded CD4+ T cell (FIG. 98A) and CD8+ T cells (FIG. 98B) and anti-TCRVβ 6-5 antibody expanded (Drug Expanded T cells) CD4+ T cells (FIG. 98A) and CD8+ T cells (FIG. 98B). PSI is defined as the percentage of polyfunctional cells in the sample, multiplied by the intensities of the secreted cytokines. The data shows that there is a greater upregulation of PSI in the CD4+ T cells (FIG. 98A) and CD8+ T cells (FIG. 98B) across the groups expanded with anti-TCRVβ 6-5 antibody.

### Example 32: Binding of the Multifunctional Polypeptide Molecule as Described Herein to Soluble TCR And Jurkat Cells Expressing TCR

[1321] In this Example, the binding affinity of a multifunctional polypeptide molecule as described herein for the TCR is tested.

[1322] Jurkat cells expressing TCR are stained with increasing concentrations of a multifunctional polypeptide molecule as described herein or a control TCRvb antibody at 4 Celsius for 30 min. Subsequently, the cells are washed with PBS buffer and antibodies bound to the surface of the cells are detected by PE-labeled anti-human Fc antibody. The percentage of the positive stained cells are blotted against the concentration. The binding of the multifunctional polypeptide molecule as described herein to soluble TCR is plotted as a graph. The Kd of the multifunctional polypeptide molecule as described herein to bind soluble TCR is calculated.

[1323] The multifunctional polypeptide molecule as described herein is immobilized on a CM5 Series S Sensor Chip via Anti-human Fc antibody to 50 RU. Soluble TRBV antigen is diluted to, e.g., 500 nM and then serially diluted two-fold. The time duration for association and dissociation is measured. This assay is run in 1×HBS-EP+ Buffer pH 7.4 and at 25C. It is evaluated whether the data is fit using a 1:1 binding model. The binding of the multifunctional polypeptide molecule as described herein or the control anti-TCRvb antibody to TCR expressed on Jurkat cells is plotted as a graph. The EC50 for the multifunctional polypeptide molecule as described herein is calculated and compared with the EC50 for the anti-TCRvb antibody.

### Example 33: In Vitro and In Vivo Characterization of a Multifunctional Polypeptide Molecule as Described Herein

[1324] This Examples describes the characterization of a murine anti-TCRvb antibody and the multifunctional polypeptide molecule as described herein. Similar to the human clonotypes (subfamilies), the TCRb variable chain locus in mice consists of 31 different families with a total of 35 subfamilies of which 23 are functionally expressed. A surrogate TCRvb clonotypical antibody for mice strain C57BL/6 has been identified which shares similar characteristics with the human TCRvb antibodies. This anti-mouse TCRvb antibody binds specifically to TCRvb in C57BL/6 mice which are expressed on approximately 15% of all T cells. Similar to the human TCRvb specific antibodies, this murine TCRvb specific antibody induces murine T cell proliferation and a similar cytokine profile in vitro. The discovery of anti-TCRvb antibody enables the evaluation of TCRvb-mediated T cell activation and re-directed cell killing in fully immuno-competent mice models, as well as to assess memory anti-tumor response in vivo.

[1325] First, the in vitro functional activity of the multifunctional polypeptide molecule as described herein is tested Splenic mononuclear cells are freshly isolated from C57BL6 mice, treated with the multifunctional polypeptide molecule as described herein. The isolated cells are assessed for TCRvβ+ T cell binding, expansion and activation. Cells are treated with, e.g., 0.0008-200 nM doses (4-fold dilutions) of the multifunctional polypeptide molecule as described herein in RPMI-1640 with 10% FBS, or medium alone, for, e.g., 6 days. On, e.g., day 3 and 6, cells are analyzed by flow cytometry using the exemplary antibodies shown below:

TABLE 18

| Primary Ab | Secondary Ab |
|---|---|
| eFluor780 | Viability |
| CD20 | A647 |
| CD3 | BV421 |
| TCRvβ 13-2/3 | PE |
| CD25 | FITC |

[1326] The multifunctional polypeptide molecule as described herein bound specifically to splenic T cells from C57BL6 mice is plotted as a graph. Activation and expansion of m TCRvβ+ T cells is analyzed at, e.g., day 3 and 6, respectively. The in vitro characterization of the multifunctional polypeptide molecule as described herein is expected to show that the multifunctional polypeptide molecule as described herein serves as a surrogate tool for syngeneic tumor model studies.

[1327] Next, in vivo experiments are performed with the multifunctional polypeptide molecule as described herein. On day 0, 8 week old female C57BL/6 mice are randomized in to three arms (e.g., n=5/arm) based on body weight. Mice are intravenously injected once either with PBS, e.g., 0.1 mg/kg and 1 mg/kg of the multifunctional polypeptide molecule as described herein. On Day 3 mice are sacrificed and harvested for whole blood and spleen. Tissues are subjected to Flow cytometry and checked for B-cells. NK cells. TCRvb+ cells and CD3+ cells.

[1328] The multifunctional polypeptide molecule as described herein is expected to expand mouse NK cells in vivo, in the blood and spleen. The study is also expected to demonstrate whether the multifunctional polypeptide molecule as described herein is tolerated at the indicated doses and duration of study.

### Example 34: Target Cell Lysis and Cytokine Profile of the Multifunctional Polypeptide Molecule as Described Herein

[1329] This Example describes potent lysis of target cells and reduced CRS associated cytokine secretion with the multifunctional polypeptide molecule as described herein.

[1330] To test target cell killing, αTCRvβ pre-expanded T cells are incubated with target cells, e.g., Raji target cells in the presence of the multifunctional polypeptide molecule as described herein or αTCRvβ antibody for 24 hours. Target cell lysis is assessed by a KILR Cytotoxicity and Cytokine Quantification as follows. Human PBMCs are isolated from whole blood. From isolated PBMC's, human CD3+ T cells are isolated using magnetic-bead separation (negative selection) (Miltenyi biotec) and activated by immobilized (plate-coated) anti-TCR Vβ13.1 (e.g., A-H.1 or BHM1709) at, e.g., 100 nM for, e.g., 6 days. Activated T-cells (from plate-coated) are then transferred and expanded in tissue culture flask at a concentration of, e.g., 50 U/ml for an additional 2 days. Expanded TCR Vβ13.1 are washed and co-cultured in the presence of target cells (e.g., Raji Cells) at a E:T ratio of 5:1 and serial diluted concentration of the multifunctional polypeptide molecule as described herein and anti-TCR Vβ (serving as control) for, e.g., 24 hours. Post, e.g., 24 hours, cell co-culture supernatants are collected and quantified for specific target cell death. Target cells (Raji cells) are a KILR-retroparticles reporter cell assay (DiscoverX).

[1331] KILR-Raji Target cells are engineered to stably express a protein tagged with enhanced ProLabel (ePL), a β-gal reporter fragment, using the KILR Retroparticles, and when its membrane is compromised due to cell death, it will release the tagged protein into the media. The KILR reporter protein is detected in the media/supernatant by the addition of detection reagents containing the enzyme acceptor (EA) fragment of the β-gal reporter. This leads to the formation of the active β-gal enzyme which hydrolyzes the substrate to give a chemiluminescent output (RLU). Percentage (%) of target cell death is calculated using the following formula: (RLU_{Treatment}−RLU_{No Treatment})/(RLU_{Maximum Lysis}−RLU_{No Treatment})×100. The pre-expanded T cells (TrEKs) by the multifunctional polypeptide molecule as described herein are expected to demonstrate efficient killing of Raji target cell at low effector. The multifunctional polypeptide molecule as described herein may require time for differentiation and expansion of TCRvβ+ T cells.

[1332] To determine if the lack of CRS associated cytokine induction by immobilized anti-TCRvβ antibodies can be recapitulated by the multifunctional polypeptide molecule as described herein, human PBMCs are incubated in the presence of T cell-activating multispecific molecules polypeptide molecule as described herein at, e.g., 3 nM. Supernatant are collected on day 1 to day 6, and cytokines are quantified by using MSD. The multifunctional polypeptide molecule as described herein may show increased cytokine production against a backdrop of delayed and reduced levels of CRS-related cytokines.

### Example 35: Cytokine Profile of the Multifunctional Polypeptide Molecule as Described Herein

[1333] This Example describes cytokines secreted by PBMCs following activation by the multifunctional polypeptide molecule as described herein. For comparison, activation by an anti-TCR beta constant 1 (TRBC1) antibody is also analyzed.

[1334] Briefly, human PBMCs are isolated from whole blood followed by solid-phase (plate-coated) stimulation with Molecule Hor Antibody F at 100 nM. Supernatant is collected on, e.g., Days 1, 2, 3, and 5 (for Molecule H) or Days 2 and 5 (for Antibody F) followed by multiplex cytokine analysis for, e.g., IFNγ, IL-2, IL-1β, IL-6, IL-10, and TNFα, quantified using MSD (Meso Scale Discovery) platform, following the manufacturer's protocol. The cytokine profile of the multifunctional polypeptide molecule as described herein is expected to be different from that of the anti-CD3 antibody OKT3 or the anti-TRBC1 Antibody F.

### Example 36: Pharmacokinetic (PK) Profile of the Multifunctional Polypeptide Molecule as Described Herein in Mice

[1335] This Example describes the pharmacokinetic (PK) profile of the multifunctional polypeptide molecule as described herein in mice to guide the dosing and/or schedule treatment decision for the efficacy study. The exemplary study design is shown in FIG. 99. Briefly, on day 0, 6-8 week old female NSG mice are implanted subcutaneously with, e.g., 1×10⁶ Raji leukemia cells. On day 2, mice are humanized by injecting 10×10⁶ human PBMC's via the peritoneal cavity. On day 9, mice are treated with a single dose of the multifunctional polypeptide molecule as described herein intravenously. Serum is harvested from animals by submandibular bleed at 0, 0.5, 1, 6, 24, 48, 72, 96, 148 hours (n=3 per time point). Serum drug concentration is measured by Sandwich ELISA.

[1336] The serum half-life of the multifunctional polypeptide molecule as described herein in tumor bearing humanized NSG animals is calculated. This data are expected to allow dose and schedule determination for efficacy studies. Exposures at the dose allows coverage above cellular EC90.

### Example 37: Optimization of the Multifunctional Polypeptide Molecule as Described Herein

[1337] The multifunctional polypeptide molecule as described herein is optimized to improve affinity for the human and cyno antigen, improve thermal stability, and remove sequence motifs that might pose chemical stability liabilities. For example, ScFv libraries for TCRβV-binding moieties are built using random mutagenesis (Caldwell et al. (1992) Randomization of genes by PCR mutagenesis. PCR Meth. Appl 2:28) or a modified version of Kunkel mutagenesis (Kunkel TA. (1985) Rapid and efficient site-specific mutagenesis without phenotypic selection. PNAS 82(2): 488-92). For affinity improvement, library selections vs human and cyno antigens are performed using standard phage display (Lee, C M et al. (2007) Selection of human antibody fragments by phage display. Nature protocols 2, 3001) and yeast display techniques (Chao G, et al. (2006) Isolating and engineering human antibodies using yeast surface display. Nature Protocols. 1(2):755-69). Thermal challenge of phage or yeast populations is used to select for clones with improved thermal stability. Selections are followed by standard screening methods such as ELISA and flow cytometry to identify individual clones with improved properties. Following hit sequencing and analysis of mutation-activity correlation, second-generation libraries are constructed using the same methods above. Library selections and individual clone screening are repeated as above with the modification that more stringent conditions are applied to select for clones with maximized activity. Following hit sequencing, scFv genes for TCRβV-binding moieties are reformatted into the biologically relevant antibody format for expression, purification, and triaging.

### Example 38: Therapeutic Efficacy of the Multifunctional Polypeptide Molecule as Described Herein in Subcutaneous Human Tumor Xenograft Models

[1338] This Example demonstrates the in vivo efficacy of the multifunctional polypeptide molecule as described herein in a subcutaneous human tumor animal model.

[1339] On day 1 of the study, e.g., 1×10⁶ cells of the human cancer cell line Raji, stably expressing firefly luciferase (Raji-luc) are subcutaneously injected in the right dorsal flank of female NOD/SCID/IL-2Rγnull (NSG) mice. On day 3, e.g., 10×10⁶ human PBMCs are transplanted into mice by injection into the peritoneal cavity.

[1340] Treatment with the multifunctional polypeptide molecule as described herein starts at day 10, when tumors has reached a mean tumor volume (TV) of e.g., 80 mm³. Mean TV of each group is not statistically different from any other group at start of treatment. Mice are treated with e.g., 0.2 mg/kg, 1 mg/kg and 5 mg/kg of the multifunctional polypeptide molecule as described herein every three days for a total of, e.g., 7 doses by intravenous bolus injection. Tumor volume (TV) is measured every 3 days by calipers and progress evaluated by intergroup comparison of TV. Tumor growth inhibition T/C [%] is calculated as T/C [%]=100×(mean TV of analyzed group)/(mean TV of vehicle group). Treatment with the multifunctional polypeptide molecule as described herein is expected to inhibit tumor growth compared to vehicle control treatment. The results are expected to demonstrate that the multifunctional polypeptide molecule as described herein inhibits tumor growth and has anti-tumor activity.

### Example 39: Therapeutic Efficacy of Multifunctional Polypeptide Molecule as Described Herein in Human Tumor Xenograft Models

[1341] This Example demonstrates the in vivo efficacy of the multifunctional polypeptide molecule as described herein in a xenograft animal model.

[1342] On day 1 of the study, e.g., 10×10⁶ human PBMCs are transplanted into NOD/SCID/IL-2Rγnull (NSG) mice by injection into the peritoneal cavity. On day 7, e.g., 1×10⁶ cells of the human cancer cell line Raji, stably expressing firefly luciferase (Raji-luc) are intravenously injected into NOD/SCID/IL-2Rγnull (NSG) mice. Control animals are injected with e.g., 10×10⁶ cells of the human control cancer cell line K562 stably expressing firefly luciferase (K562-luc). These animals are used to assess specific killing ability of the multifunctional polypeptide molecule as described herein. Treatment with the multifunctional polypeptide molecule as described herein starts at day 16, when tumor engraftment has reached a mean bioluminescence flux level of e.g., 4×10⁷ photons/s. Mean Flux level of each group is not statistically different from any other group at start of treatment. Mice are treated with e.g., 1 mg/kg and 5 mg/kg of the multifunctional polypeptide molecule as described herein every three days for a total of, e.g., 6 doses by intravenous bolus injection. Tumor burden is measured weekly by bioluminescence imaging and progress evaluated by intergroup comparison of total bioluminescence flux (Total Flux). Tumor growth inhibition T/C [%] is calculated as T/C [%]=100×(mean Total Flux of analyzed group)/(mean Total Flux of vehicle group).

[1343] The results are expected to demonstrate that the multifunctional polypeptide molecule as described herein inhibits tumor growth and has anti-tumor activity.

### Example 40: Therapeutic Efficacy of the Multifunctional Polypeptide Molecule as Described Herein in Human Tumor Xenograft Models

[1344] This Example demonstrates the in vivo efficacy of the multifunctional polypeptide molecule as described herein in a xenograft animal model.

[1345] On day 1, e.g., 20×10⁶ cells of the human cancer cell line RPMI-8226, stably expressing firefly luciferase (RPMI-8226-luc) are intravenously injected into NOD/SCID/IL-2Rγnull (NSG) mice. On day 11, e.g., 10×10⁶ human PBMCs are transplanted into mice by injection into the peritoneal cavity. Treatment with the multifunctional polypeptide molecule as described herein starts at, e.g., day 17, when tumor engraftment has reached a mean bioluminescence flux level of, e.g., 4×10⁷ photons/s. Mice are treated with e.g., 0.5 mg/kg of the multifunctional polypeptide molecule as described herein once a week for a total of, e.g., 2 doses by intravenous bolus injection.

[1346] Tumor burden is measured weekly by bioluminescence imaging and progress evaluated by intergroup comparison of total bioluminescence flux (Total Flux). Tumor growth inhibition T/C [%] is calculated as T/C [%]=100×(mean Total Flux of analyzed group)/(mean Total Flux of vehicle group).

[1347] Treatment with the multifunctional polypeptide molecule as described herein is expected to inhibit tumor growth compared to vehicle control treatment. The results are expected to demonstrate that the multifunctional polypeptide molecule as described herein inhibits tumor growth and has anti-tumor activity.

### Example 41: Production of Bispecifics

[1348] All DNA sequences encoding the bispecific molecules were synthesized by GeneArt and cloned into the mammalian expression vector pcDNA3.4. The ExpiCHO expression system was used for expression of BKM0186. ExpiCHO-S Cells were grown to the optimal transfection density and viability in ExpiCHO expression medium according to the manufacturer's protocol. Cells were transiently transfected using the ExpiFectamine™ CHO Transfection Kit according to the manufacturer's protocol. Each chain was added in a 1:1:1 wt/wt/wt ratio. The max titer protocol was used where on the day after transfection, ExpiFectamine™ CHO Enhancer and ExpiCHO™ Feed are added to the flask followed by transfer of the flask to a 32° C. incubator with a humidified atmosphere of 5% CO2 in air. On Day 5 after transfection, the second volume of feed is added and the flask is returned to the 32° C./5% CO2 incubator and harvested on Day 14 after transfection Cells are harvested by centrifugation and subsequent filtration using a 0.22 μm filter.

[1349] Following harvest and filtration, the clarified cell culture supernatant was loaded onto a 40 mL column packed with MabSelect SuRe resin equilibrated with Dulbecco's PBS pH 7.4 at a flow velocity of 226 cm/hr using an AKTA Pure FPLC. The column was washed with 20 column volumes (CV) of DPBS or until the UV280 reaches baseline. BKM0186 was then eluted with S column volumes of 20 mM Citrate, 150 mM NaCl pH 3.0. The eluate was neutralized with 10% Tris-HCl pH 8.0. The concentration of the neutralized eluate was quantified using a Nanodrop One-C using the extinction coefficient. Following analysis, the Protein A eluate was diluted 10-fold in cation exchange (CEX) Buffer A: 50 mM MES. 20 mM NaCl pH 5.6 and applied to a Mono S™ 10/100 GL column equilibrated with Buffer A at 458 cm/h using an AKTA Pure FPLC. Following a 10CV wash step with Buffer A, bispecifics were eluted with a 20CV 0-50% gradient of Buffer B: 50 mM MES, 1 M NaCl, pH 5.6. The main peak containing the protein of interest (POI) was pooled. The CEX pool was buffer exchanged using a HiPrep 26/10 desalting column equilibrated with formulation buffer: 20 mM Histidine. 7% Sucrose. 0.02% Tween 80, pH 6.0, at a flow velocity of 113 cm/hr on an AKTA Pure FPLC. The formulated material was quantified and analyzed via analytical SEC (aSEC) and SDS-PAGE to determine purity.

[1350] Analytical SEC was performed using an AdvanceBio SEC 300A 2.7 um 4.6×300 mm SEC column equilibrated with 50 mM Sodium Phosphate, 300 mM NaCl pH7.0 at 0.35 mL/min on an Agilent 1100 HPLC. The SDS-PAGE gel was stained with Coomassie Blue stain.

### Example 42: Plasmon Resonance (SPR) Binding

[1351] All interactions between bispecifics and relevant receptors were analyzed by Surface Plasmon Resonance (SPR) on a Biacore T200 instrument.

[1352] BKM0186 at 2 ug/mL was immobilized on a Series S CM5 chip via human Fc antibody to 80 RU Human IL2Ra and cynomolgus IL2Ra were diluted to 500 nM, human IL2R beta-gamma and cynomolgus IL2R beta-gamma were diluted to 125 nM, and human IL2R trimeric complex was diluted to 50 nM and then serially diluted two-fold in 1×HBS-EP+ buffer for a total of 10 concentrations. Multi cycle kinetics was run where the chip is regenerated with 3 M Magnesium Chloride between each cycle followed by a new injection of BKM0186. An association time of 120 seconds and a dissociation time of 150 seconds for human and cyno IL2Ra. 300 seconds for human and cyno IL2R beta-gamma, and 900 seconds for the human IL2R trimeric complex was done at 30 uL/min. This assay was run in 1×HBS-EP+ Buffer pH 7.4 and 25C. Sensorgrams were corrected by double reference subtraction using the reference flow cell not treated with BKM0186 and a blank cycle of buffer alone. BIAevaluation software was used for data analysis and the data were fit using a 1:1 Langmuir binding model for calculation of the KD value (Koff/Kon). Due to faster off rates observed for human and cyno IL2Ra binding, the data were fit using a steady state model where equilibrium binding response is analyzed.

[1353] BKM0186 at 2 ug/mL was immobilized on a Series S CM5 chip via human Fc antibody to 80 RU. Human Vβ6 TCR and cynomolgus Vβ6 TCR were diluted to 250 nM and then serially diluted two-fold in Ix HBS-EP+ buffer for a total of 10 concentrations. Multi cycle kinetics was done with an association time of 120 seconds and a dissociation time of 600 seconds, for human Vβ6 TCR and 300 seconds for cynomolgus Vβ6 TCR at 30 uL/min. This assay was run in 1×HBS-EP+ Buffer pH 7.4 at 25C. Sensorgrams were corrected by reference subtraction using the reference flow cell not treated with BKM0186. BIAevaluation software was used for data analysis and the data were fit using a 1:1 Langmuir binding model for calculation of the K_{D} value (K_{off}/Kₒₙ).

[1354] BKM0186 has high affinity binding (Table 19) to both human and cynomolgus Vβ6 TCRs as assessed by surface plasmon resonance (SPR). Additionally, BKM0186 exhibits comparable binding to both human and cynomolgus IL-2Rα and IL-2Rβγ heterodimers and the binding affinities are broadly in line with previously reported values.

[1355] Binding of BKM0186 to T cells as assessed using FACS analysis of PBMC's further demonstrates exquisite selectivity of BKM0186 to Vβ6 T cells with no measurable binding observed to any other immune cells (FIG. 104).

TABLE 19
Binding affinity of BKM0186 to the cognate binding receptors
measured using Surface Plasmon Resonance (SPR)

| Antigen | BKM0186 (K_{D}) |
|---|---|
| Human TCRVβ | 1.7 nM |
| Cyno TCRVβ | 4.9 nM |
| Human IL-2Rα | 45 nM |
| Cyno IL-2Rα | 48 nM |
| Human IL-2Rβγ | 3.8 nM |
| Cyno IL-2Rβγ | 3.3 nM |
| Human IL-2Raβγ | 0.1 nM |

### Example 43: Selective Binding of BKM0186 to T Cells Within PBMC Mixture

[1356] Normal health donor human PBMCs were resuspended in at 2 million cells/mL in PBS and 100 μL added to each well of a round bottom tissue culture treated sterile plate. Post staining with Fixed Viability Dye, appropriate quantities of commercially available fluorochrome labeled surface antibodies (Panel 1) were added to the appropriate sample wells. The plates were vortexed and incubated at 2-8° C. (refrigerated) in the dark for 30 minutes. Following staining for Panel 1, plates were centrifuged (set at 400×g; 5 minutes; RT), supernatant aspirated and washed twice with 200 μLs of 1% BSA PBS. Cell pellets for Panel 1 were then resuspended in 0.2 mL of 1% PFA, before transfer to a 96 well u-bottom plate for analysis.

TABLE 20
Exemplary antibodies used

| # | Antibody | Conjugate | Clone | Vendor |
|---|---|---|---|---|
| 1 | CD4 | BV7185 | L200 | BD |
| 2 | CD8 | BV650 | RPA-T8 | BD |
| 3 | CD2 | Per Cp Cy5.5 | RPA-2.10 | BioLegend |
| 4 | CD3 | BV605 | 10D12 | Miltenyi |
| 5 | NKG2A | PE | Z199 | Beckman Coulter |
| 6 | TCRvβ | AF647 (Read as APC) | — | Marengo |
| 7 | CD20 | PE Cy7 | J3.119 | Beckman Coulter |
| 8 | CD14 | FITC | M5E2 | BioLegend |
| 9 | Live/Dead | NUV450 | N/A | ThermoFisher |

[1357] Binding of BKM0186 to T cells as assessed using FACS analysis of PBMCs further demonstrates exquisite selectivity of BKM0186 to Vβ6 T cells with no measurable binding observed to any other immune cells (FIG. 104).

### Example 44: Binding of BKM0186 to Pure T Cells Expressing Either Vβ6 TCR and/or CD25

[1358] Pan T-cells were isolated from PBMC's via negative selection on the autoMACS. T-cells were stained for TCRVβ6-5 and sorted on the Sony SH800 cell sorter into cell culture media. Sorted TCRVβ6-5 T-cells and non-sorted pan T-cells were activated and expanded using anti-CD3/CD28 beads followed by IL-2 culture. Portion of activated T-cells were allowed to rest for 3-days in serum-free media. Anti-CD25 FACS staining to confirm CD25 upregulation (from activation) and downmodulation (from resting). T-cells that represents TCRVβ6-5 (pos) CD25 (hi); TCRVβ6-5 (pos) CD25 (low); TCRVβ6-5 (neg) CD25 (hi): TCRVβ6-5 (neg) CD25 (low) are checked for BKM0186 construct binding.

[1359] As shown in FIG. 105, BKM0186 was shown to bind Vβ6 CD25H T cells (circle) with greater avidity, as a result of co-operative binding, with a binding ECso of 0.5 nM compared to either non-Vβ6 CD25^{Hi} T cells (square) and Vβ6 CD25^{Low} T cells (triangle). This avidity effect confirms that BKM0186 engages both Vβ6 and IL-2R via a cis binding mode.

### Example 45: In-Vitro T-Cell Stimulation and Expansion in Primary Human Peripheral Blood Mononuclear Cells (PBMCs)

[1360] Peripheral blood mononuclear cells were isolated from blood leukapheresis samples using density gradient separation. Human T-cells were stimulated and expanded from peripheral blood mononuclear cells with the addition of BKM0186 (concentration specified in text) cultured in X-Vivo 15 media for 5 days, incubated at 37° C.

[1361] Binding of BKM0186 to Vβ6 T cells results in selective expansion of only Vβ6 T cells when assessed over a period of 5 days in healthy human PBMCs at 37° C. FIG. 106 shows a concentration-effect curve of BKM0186-mediated activation (CD25 expression) and expansion (positivity for Vβ6 TCRs) in both human CD4⁺ and CD8⁺ T cells. These plots show the extent of proliferation of Vβ6 T cells as a proportion of the total CD8⁺ and CD4⁺ T cell populations with an EC₅₀ of 6 and 12 nM, respectively. Pronounced upregulation of CD25 in the expanded CD4⁺ and CD8⁺ Vβ6 T cells indicates the activated state of these cells Additional in vitro activation assays in human PBMCs demonstrate upregulation of other activation markers (e.g., Granzyme B, CD69. ICOS, etc) particularly on CD8⁺ T cells, further characterizing their cytotoxic potential.

[1362] Expanded CD4⁺ and CD8⁺ Vβ6 T cells were further assessed for various markers of memory sub-pools that demonstrated a consistent shift of BKM0186-treated human PBMCs to either central memory (TCM) phenotypes.

[1363] Using identical protocols, expansion of TCRVβ+ T cells mediated by additional bispecific constructs BMM0317. BLM0318 and BLM0321 was demonstrated as shown in FIG. 124.

### Example 46: In-Vitro TCR Sequencing

[1364] Total RNA was extracted from T cells using Maxwell Simply RNA Kit. The RNA was quantified using Qubit High Sensitivity RNA Assay and quality was analyzed using Agilent Tape station. Sequencing libraries were generated using SMARTer Human TCR a/b Profiling Kit for human cells, or SMARTer Mouse TCR a/b Profiling Kit according to the manufacturer's protocol. Final libraries were then pooled and sequenced (paired end. 300 bp) on Illumina MiSeq. Data generated was demultiplexed and FastQC was performed after trimming. MiXCR pipeline tool was used to specifically align sequence reads to TCR germline segments of TRA. TRB. TRD and TRG genes in the datasets for clonotype identification, CDR3 sequences and clonotype abundances. TRBV genes are counted and grouped together among their specific clonotypes and plotted as a bar chart representing frequency/abundance. Each TRBV gene is plotted against relative abundance (where 1 equals 100% of total TRBV gene), equivalent to total T-cell abundance BKM0186 selectively expanded T cells bearing TRBV6-1, TRBV6-2, TRBV6-3, TRBV6-5 and TRBV10-3. (FIG. 107)

### Example 47: Expansion and Activation of TCRVβ6+ T Cells by BKM0186

[1365] Cryo-preserved PBMCs were thawed and rested for 30 min at 37° C., then plated at 3×10⁵ cells per well in a 96-well round-bottom plate. Sterile biotinylated constructs were diluted in X-Vivo 15 media and serial dilutions were performed. Wells without construct (media alone) were used to determine background signal. Cells were incubated with construct for 5 days at 37° C. Early on day 5. Brefeldin was added to all wells and cells were incubated for another 4 hours. Cells were then transferred to a V-bottom plate for staining. Cells were spun and washed, then stained with viability dye, followed by surface markers, biotinylated TCRvB monoclonal antibody, and secondary streptavidin antibody to detect both TCRvB-bound cells and construct. After thorough washing, cells were fixed and permeabilized using the eBioscience FoxP3 staining kit. FoxP3, granzyme B, and IFNg were stained in permeabilization buffer. Following washes with permeabilization buffer, cells were resuspended in flow buffer (PBS+BSA) and run on the Cytek Aurora. Analysis was performed in FlowJo. FIG. 108A shows robust expansion of both CD4⁺ TCRVβ6+ and CD8⁺ TCRVβ6+ T cells mediated by BKM0186 while very little to no expansion was observed with the controls RSV-IL2 bispecific and anti-TCRVβ6 arm mAb indicating that the expansion is mediated by crosslinking of both TCR and IL2R. The activation of TCRVβ6+ T cells by BKM0186 resulted in upregulation of granzyme B and Interferon gamma cytokine as shown in FIG. 108B.

### Example 48: Evaluation of Memory T Cell Differentiation

[1366] Peripheral blood mononuclear cells, PBMC's were isolated from blood leukapheresis samples using density gradient separation. Human T-cells were stimulated and expanded from peripheral blood mononuclear cells with the addition of BKM0186 or control RSV-IL2 at 10 ng/ml in solution and cultured in X-Vivo 15 media for 7 days, incubated at 37° C. Monovalent anti-TCRVβ6 antibody was immobilized on to plate for stimulation to serve as a TCRVβ-only control. After stimulation, PBMCs were stained for CD3, CD4, CD8. CD45RA, CCR7, and TCRVβ6 for flow cytometry analysis using (FITC) anti-human CD45RA (clone 5H9), (PE) anti-human CCR7 (clone OX-108), (BV-421) anti-human CD4 (clone OKT4), (PerCP-Cy 5.5) anti-human CD8 (clone SKI). Biotinylated TCRVβ6 monoclonal antibody, AlexaFluor 647 Streptavidin antibody. TCRVβ6 positively stained CD4 or CD8 T cells were gated to characterize memory phenotype expression mediated by BKM0186 and control treatment. As shown in FIG. 109, BKM0186 showed robust expansion in both Central memory (upper left) and Effector memory (lower left) quadrants.

### Example 49: Cytokine Induction Mediated by Stimulation of PBMCs by BKM0186

[1367] Supernatants from in vitro human PBMC stimulation assays were further assayed for inflammatory cytokine levels using Meso Scale Detection (MSD) immunoassays. Stimulation of human PBMCs with BKM0186 led to moderate release of some proinflammatory cytokines as shown in FIG. 110. Consistent with published findings, these cytokine levels were generally lower than levels as saved from human PBMCs stimulated with an anti-CD3 bispecific antibodies. Of note, the cytokine release profiles following activation of cynomolgus monkey PBMCs with BKM0186 was similar to the profile in stimulated human PBMCs using this assay.

### Example 50: Binding Ex Vivo Cytotoxicity Evaluation of BKM0186 in Autologous TIL-PDX-O Co-Culture Using High Content Analysis (HCA)

[1368] BKM0186 within four concentrations ranging from 0.3-10 μg/mL as a single agent, was evaluated ex vivo in autologous TIL-PDX-O co-culture from 4 patient-derived Champions TumorGraft® models: CTG-3493, CTG-3571 representing human non-small cell lung cancer, CTG-3629 representing human rectal cancer, and CTG-3631 representing human colorectal cancer by confocal high content analysis (HCA). Tumor cell cytotoxicity was also assayed by the relative organoid fluorescent intensity and relative organoid area.

[1369] The high content analysis assay using confocal microscopy was developed with three colors. TILs and PDX-O tumor cells are labeled with distinct dyes prior to co-culture, and a dead cell detection dye is added to the co-culture at the study endpoint. On Day-3, cryopreserved PDX fragments were thawed, counted, and stained with CellTracker Deep Red (CTDR) Stained PDX-fragments were washed and re-suspended in PDX-organoid media and plated at a density of approximately 5000 cells in 50 μl organoid media/well in a 96-well plate ultra-low attachment round bottom plate. Organoids were allowed to form over a period of 3-days. After three days, on Day 0, PDX-O matched TILs were stained with Cell Trace Violet (CTV). Stained TILs were washed, re-suspended in TIL media, and co-cultured with matched PDX-O at a density of approximately 25,000 cells/well (in 50 μL. TIL media) in the appropriate wells. On the same day (Day 0), control(s) and BKM0186 at different concentrations (in additional 50 μL PDX-O media) were administered in quadruplicates. At the study endpoint, on Day 5 (approx. 120 hours after TIL and test agent/control administration), the NucGreen® Dead 488 probe was added directly to the wells to stain dead cells. Image z-stacks were captured approximately 3 hours after dead cell stain at 4× magnification using CellInsight CX7 LZR HCA instrument. Images were collected using filter sets appropriate for each marker and analyzed using HCS Cellomics Studio Software (per well). For all the models examined. PDX-O cytotoxicity was quantified through examination of organoid fluorescent intensity and is reported as relative organoid fluorescent intensity and relative organoid area (normalized to Isotype molecule).

[1370] In 3 out of 4 donors, BKM0186 potently expanded and activated in situ human TILs that then elicited potent killing of surrounding tumor tissue as represented by reduction in the organoid size (FIG. 111). Both TIL expansion and human tumor-killing was significantly more potent with samples treated with BKM0186 compared with the same samples treated with a clinically available anti PD-1 antibody (Pembrolizumab: Keytruda).

### Example 51: In Vivo Mouse Model Experiments (Syngeneic Mouse Tumor Studies)

[1371] As a result of the limited homology between human and mouse or other rodent species at the TRB locus, a direct homolog of the Vβ6 gene (TRBV6) does not exist and so the likelihood of species cross-reactivity of BKM0186 and BKM0281 beyond non-human primates is very low. Therefore, efficacy experiments performed in syngeneic murine tumor models were conducted with a mouse orthologue molecules (mBKM0186 and mBKM0281) with similar molecular configurations as human molecules, that targets and expands Vβ13 TCR expressing murine T cells and recapitulates the immunology of BKM0186 and BKM0281 in mice. Vβ13 T cells are one of the most abundant germline Vβ TCR variants in mice and are expressed in TILs of all tumor bearing mice.

[1372] All mice were acquired from The Jackson Laboratory. All procedures were performed in compliance with established ethical regulations and were approved by the Institutional Animal Care and Use Committee (IACUC).

[1373] Mouse tumor cell lines RENCA (CRL-2947), B16F10 (CRL-6475), CT26 (CRL-2638), RM1 (CRL-3310) and EMT6 (CRL-2755) were obtained from American Type Culture Collection. MC38 were obtained from NIH (ENH204-FP). Cell lines were tested for mycoplasma and other pathogens and cultured according to their guidelines.

[1374] BALB/c female mice were implanted with 1×10⁵ of RENCA cells resuspended in PBS: 5×10⁴ of CT26 or EMT6 cells resuspended in PBS. C57BL/6 female mice were implanted with 5×10⁴ of MC38; 2×10⁴ of B16F10 cells resuspended in PBS. C57BL/6 male mice were implanted with 2×10⁴ of RM1 cells resuspended in PBS by subcutaneous injection on the right flank. Following tumor implantation, mice were randomized into treatment groups (8-10 mice per group) when tumor size reached between 80-150 mm³. Mice were monitored for morbidity and mortality daily.

[1375] Antibodies were administered by intraperitoneal injection (Day 0) with murine surrogate bispecifics (1.0-1.5 mg/kg), or PBS once per week for 3-4 treatments. Tumor growth was monitored over time using caliper measurement of X and Y diameter, and body weight recorded. Tumor volume was calculated [X*Y*(X/2)]. Mice were euthanized when tumor volume reached 2000 mm³, or loss of body weight of more than 20% within a 1-week timeframe as indicated in the IACUC protocol CR-0147. Surviving cured mice will be continued to be monitored until they reach Day 100. Additionally, tumor-free cured mice were rechallenged with tumor cell lines on the left flank to evaluate memory response.

[1376] As shown in the Kaplan-Meier survival plots in FIG. 114 and tumor growth curves in FIG. 113, mBKM0186 resulted in significant regression of tumors in all the models including the anti-PD-1 resistant RENCA. B16F10 and RM1 models, resulting in significant improvement in survival, except in the very aggressive RM1 model. In EMT6, this effect was dose related across a dose range of QW IP 0.5, 1, and 1.5 mg/kg doses of mBKM0186 and mBKM0281 with weekly doses of 1 mg/kg and 1.5 mpk of mBKM0186 and 1.5 mpk of mBKM0281 appearing to be optimal (FIG. 112). Furthermore, 100% cured EMT6 mice upon rechallenging with the respective tumor cells exhibited no tumor growth demonstrating induction of memory. This long-term protection from tumor re-challenge in mice also appears to be due to the accumulation of memory CD8+Vβ 13 T cells (FIG. 115 and FIG. 116). Overall, these data support the possibility that BKM0186 will promote both potent and durable anti-tumor responses as a single agent in humans.

### Example 52: Pharmacodynamics and Mechanistic Studies in Syngeneic Models

[1377] To further explore mechanisms underlying the observed anti-tumor activity with mBKM0186, immune profiling of TILs isolated from murine EMT6 tumors after treatment with vehicle or mBKM0186 were assessed by flow cytometry and immunohistochemistry (IHC) on tissue sections. Following 14 days of QW dosing (i.e., 2 doses) with mBKM0186, a significant accumulation of Vβ CD8⁺ T cells in TILs was noted compared with vehicle treated mice. Given the degree of expansion of Vβ CD8⁺ T cells, this was reflected in an overall significant increase in the numbers of CD8⁺ T cells in tumors with a significant proportion showing upregulation of cytolytic molecules such as granzyme B. (FIG. 117)

[1378] Importantly, the ratio between CD8⁺ T cells and FoxP3⁺ Regulatory T cells (Treg) also significantly increased post treatment with mBKM0186. To confirm that mBKM0186 expanded Vβ CD8⁺ T cells are responsible for the anti-tumor effects observed in syngeneic mice, EMT6 mice were treated with mBKM0186 in the presence and absence of a specific Vβ T cell-depleting antibody. As shown in FIG. 118, the anti-tumor effects of mBKM0186 were abolished in mice that also received doses of the Vβ T cell-depleting antibody, thereby confirming the central importance of the expanded and activated Vβ T cell population to the efficacy of mBKM0186 in mice.

### Example 53: In Vivo Cynomolgus Monkey Experiments

[1379] Exploratory studies of intravenous (IV) infusions of BKM0186 and BKM0281 at multiple doses were conducted to assess preliminary safety and tolerability, pharmacokinetics, and pharmacodynamics. All studies were conducted in naïve female cynomolgus monkeys (Macaca fascicularis, of Cambodian origin, that were 2.3-4.9 years old with body weights in the range of 2-4 kg).

[1380] For Pharmacokinetic Assessments, concentrations of BKM0186 were measured using the MSD electrochemiluminescence (ECL) assay platform. The assay comprises a plate-bound TCR Vβ6 antigen reagent to capture BKM0186 or BKM0281, followed by a two-step biotinylated anti-human IL-2 antibody and streptavidin-Sulfotag-TAG for the detection of the drug complex, with a validated lower limit of quantitation (LLoQ) of 0.05 nM. In brief, plates were coated with 25 uL/well of TCR Vβ6 antigen, incubated overnight at 4° C., followed by blocked using 250 μL/well of PBS containing 3% BSA for 2 hours. Serum samples were diluted 1:50 in PBS-T to fall in the linear range of the standard curve (samples which generated signals that did not fall within the linear range of the standard curve were re-run at either 1:200 for samples above the linear portion; and 1:20 for samples that fell below the linear portion. Samples were added to the plate at 25 uL/well in duplicates and incubated overnight at 4° C. 25 uL/well of the biotinylated anti-IL2 antibody at a final concentration of 5 ug/mL in PBST+1% BSA were added and incubated at room temperature (RT) for 2 hours. Plates were washed, then a 1:1000 dilution of Streptavidin-Sulfo-TAG in PBST was added to the plates at 25 uL/well for 30 mins at RT, then washed. A 1:4 dilution of MSD Read Buffer A in deionized water was as added at 150 μL/well to plates, that were then read on an MSD plate reader. Standard curves used to calculate analyte concentrations were established by fitting the signals from the standard to a 4-parameter logistic (or sigmoidal dose-response) model with a 1/Y\hat{ }2 weighting. The LLOQs were derived from the lowest concentration of the standard curve that met the following criteria: CV %<20, and Recovery % 85-115.

[1381] For Pharmacodynamic Assessments, assessments were undertaken in blood over a range of timepoints. The assessment of Vβ6 CD8+ T cells in blood samples drawn from dosed monkeys was achieved using flow cytometry for the quantification of Vβ6 T cells expansion and activation. T cell activation were measured by the expression of IL 2Rα (CD25) and inflammatory cytokines IFNγ, TNFα, and IL6. For flow cytometry assays, 50 μL of whole blood (for cell surface staining), or 95 μL of whole blood (for intracellular staining) were used per well (96-deep well plate) of staining. Following cell surface staining. 1.5 mL of FACS lysing solution 1× was added to each well and incubated in the dark at RT for 10 minutes. Immediately after the incubation, plates were centrifuged (set at 400×g; 5 minutes: RT), supernatant aspirated and washed with 1700 mL of stain buffer (PBS plus 0.04% BSA). Cell pellets were then resuspended in 0.4 mL of 0.05% formalin solution diluted in FACSFlow and transferred to a 96 well u-bottom plate for analysis. For intracellular staining, prewarmed 1.8 mL of 1×LYSE/FIX buffer was added to each well. The plates were placed in an incubator and set to maintain 37° C., for 15 mins and centrifuged (set at 600×g; 8 mins: RT), washed, and resuspended in 1 mL of cold Perm Buffer III for 30 minutes on wet ice. Antibodies were added to the appropriate sample wells for staining. The plates were incubated in a refrigerator set to maintain 4° in the dark for 60-70 minutes. Following the incubation, plates were washed twice (centrifuge set at 600×g; 8 minutes; 4°), supernatant aspirated and cell pellets were then resuspended in 0.3 mL of stain buffer and transferred to a 96 well u-bottom plate for analysis. Samples were analyzed utilizing the LSRFortessa™ II Flow Cytometer and DIVA® 8.0.1 software. Inflammatory cytokines were measured using the Non-Human Primate cytokine kit (Millipore, #PRCYTOMAG-40k), per manufacturer's instructions, and detected using the Luminex BioPlex Systems.

[1382] FIG. 119A and FIG. 119B (A&B) illustrate concentration-time curves for all IV doses (30 min infusion). Following a rapid distribution phase, both BKM0186 and BKM0281 cleared rapidly from blood in a dose-dependent manner with BKM0281 exhibiting faster clearance compared to BKM0186. Despite fast clearance, both BKM0186 and BKM0281 showed sustained expansion of Vβ6 CD8+ T cells (as a proportion of the total CD8+ T cell compartment) (FIG. 120A and FIG. 120B) for up to 100 hours and serum levels soluble CD25 (sCD25) (FIG. 121), a serum marker of T cell activation, in monkeys administered a single IV dose of BKM0186 and BKM0281 across a dose range. In contrast, a minimal expansion of Treg was observed. The cytokine data supports dose-dependent Test Article effects on MCP-1, MIP1β, IL-10, IL-1RA, IFN-γ (FIG. 123A and FIG. 123B), IL-5, and IL-6 (FIG. 122A and FIG. 122B). The cytokine data supports an uncertain effect on IL-4 and IL-12/23 (p40). Detectible concentrations of both cytokines were present for isolated animals; however, the relationship of these changes to IL2×TCRVβ administration is uncertain due to their sporadic presence and the lack of a clear dose response. There were no Test Article-related effects on IL-8, TNF-α, IL-2, IL-13, IL-15, IL-17, IL-18, GM-CSF, or IL-1β.

### Example 54: Human Expansion Assays to Assess TriSTARs and Vb or CD3 Bispecific TCEs

[1383] Flat-bottom 96-well plates were coated overnight with 100 nM Mesothelin antigen. Thawed human PBMCs were diluted in X-Vivo15 media and incubated at 37° C., for 5 days in the presence of diluted constructs. After being stained for viability and surface antigens, cells were fixed and permeabilized using FoxP3/Transcription Factor Staining Buffer kit. Cells were stained for intracellular markers and analyzed on Cytek Aurora flow cytometer for activation (% CD25+) of CD8 T cells.

### Example 55: Human Cytotoxicity Assays to Assess TriSTARs and vb or CD3 Bispecific TCEs

[1384] Cryopreserved human PBMCs were thawed and expanded in X-Vivo15 media with 50 nM of an exemplary embodiment of the multifunctional molecule as provided herein (e.g., soluble form) for 3-4 days. PBMCs were then rested in X-Vivo15 with 100 IU/mL human IL-2 for 1-2 days. The cells of a human tumor cell line were pre-seeded overnight in 96-well, flat-bottom plates in X-Vivo15. PBMCs and constructs were then added to the pre-seeded cells of a human tumor cell line at an E:T ratio of 1:1 or 2:1 and incubated for 20 hrs. LDH assay was performed and read according to manufacturer's instructions. Briefly, supernatants were removed from cultures and diluted in LDH storage buffer, then diluted in detection reagent. After 1 hr incubation, luminescence was read on Spectramax instrument.

### Example 56: Murine Expansion Assays to Assess TriSTARs and vb or CD3 Bispecific TCEs

[1385] Flat-bottom 96-well plates were coated for 2 hours to overnight with 100 nM Mesothelin antigen in PBS. Obtained murine BALB/c spleens were smashed through 70 μm filter. RBCs were lysed and isolated PBMC (3e+5 cells in media) were incubated with diluted constructs on plate bound Mesothelin for 4 days in mouse media (RPMI+10% FBS+1.5 mM HEPES+0.5 mM BME+L-Glut+Anti-Anti+1 mM sodium pyruvate+non-essential amino acids) prior to staining for viability and surface antigens. Fixed (FoxP3/Transcription Factor Staining Buffer kit) and permeabilized cells were stained for intracellular markers and analyzed on Cytek Aurora flow cytometer for activation (% CD25+) of CD8 T cells.

### Example 57: Murine Cytotoxicity Assays to Assess TriSTARs and vb or CD3 Bispecific TCEs

[1386] Obtained murine BALB/c splenocytes were expanded in mouse media with 5-50 nM of an exemplary embodiment of the multifunctional molecule as provided herein (e.g., soluble form) for 3 days. Splenocytes were rested in mouse media with 100 IU/mL human IL-2 for 2 days. EMT-6 cells were pre-seeded overnight in 96-well flat-bottom plates in Waymouth's media+10% FBS. Media was then replaced with RPMI+1% FBS and splenocytes and constructs were added to the pre-seeded EMT-6 cells at an E:T ratio of 1:1 and incubated for 20 hours. LDH assay was performed and read according to manufacturer's instructions. Briefly, supernatants were removed from cultures and diluted in LDH storage buffer, then diluted in detection reagent. After 1 hr incubation, luminescence was read on Spectramax instrument.

### Example 58: PK Assay for BMM0449

[1387] Human Mesothelin antigen (BIM0366) was captured, and PK samples were applied. Biotinylated mouse TCRVβ antigen (BLM0404) was added as the primary detect reagent. SULFO-Streptavidin was used as the secondary detect reagent.

### Example 59: PK Assay for BNM0092

[1388] Human Mesothelin antigen (BIM0366) was captured, and PK samples containing FLAG-tagged BNM0092 were applied. Biotinylated mouse monoclonal anti-FLAG antibody was added as the primary detect reagent. SULFO-Streptavidin was used as the secondary detect reagent.

### Example 60: Exemplary Embodiments of the Multifunctional Molecule as Provided Herein Targeting CD20 as a Tumor-Associated Antigen (TAA)

[1389] Expansion of murine CD8+& Vβ T cells along with depletion of B cells were evaluated by incubating murine splenocytes with either CD3×CD20 bispecific or Vβ×IL-2×CD20 Tristar for 5 days. Both B and T cells were assessed using FACS. Anti-TCRvb6-5, anti-CD25, anti-CD3, anti-CD8 antibodies were used to detect T cells while anti-CD19 antibody was used to detect B cells. Anti-CD20 mAb & mIgG2a×IL2 bispecific were used as controls. Robust Vβ T cell expansion was observed with the Vβ×IL-2×CD20 Tristar molecule, but not with the CD3×CD20 bispecific or control molecules (Anti-CD20 mAb & mIgG2a×IL2 bispecific). Vβ×IL-2×CD20 Tristar molecule was more potent than CD3×CD20 bispecific in expanding CD8+ T cells. In addition, the Vβ×IL-2×CD20 Tristar molecule exhibited a log higher potency than the CD3×CD20 bispecific in depleting murine B cells. (FIGS. 126A, 126B, and 126C)

[1390] In vivo B cell depletion was evaluated by single-dose treatment of Balb/c mice with either Vβ×IL-2×CD20 Tristar molecule or with the CD3×CD20 bispecific. Test articles were administered via IP route at a dosage of 3 mg/kg and B cells were assessed using CD19 detection using FACS 7 days after the treatment. Compared to vehicle control, both constructs induced robust in vivo B cell depletion. (FIG. 127)

### Example 61: Exemplary Embodiments of the Multifunctional Molecule as Provided Herein Targeting MSLN (Mesothelin) as a Tumor-Associated Antigen (TAA)

[1391] Both TriSTAR and CD3 bispecific induced robust T cell expansion in the presence of plate-bound Mesothelin, but CD3 bispecific treatment resulted in slightly more expansion. (FIGS. 128A and 128B)

[1392] Both Vβ (an exemplary embodiment of the multifunctional molecule as provided herein) and CD3 bispecifics expanded T cells in the presence of plate-bound Mesothelin, but expansion was significantly higher with CD3 bispecific. (FIGS. 129A and 129B)

[1393] Both Tristar (Vβ×IL-2×MSLN) constructs, which are exemplary embodiments of the multifunctional molecule as provided herein, and CD3×MSLN bispecific construct induced cytotoxicity vs a human tumor cell line. When the tumor engaging arm is bivalent (BMM0462), higher degree of tumor cell-killing was observed. (FIGS. 130A and 130B)

[1394] Vβ×MSLN (1×1 or 2×2) bispecifics, which are exemplary embodiments of the multifunctional molecule as provided herein, and CD3×MSLN bispecifics were tested for their ability to induce cytotoxicity vs human tumor cell line. While all tested bispecifics induced similar levels of maximum % cytotoxicity (Emax 18-38%), the EC50 for Vβ×MSLN (2×2) was significantly lower than EC50 for both Vβ×MSLN (1 ×1) and CD3×MSLN bispecifics. (FIGS. 131A and 131B)

[1395] Although robust expansion of murine T cells was observed with Tristar (Vβ×IL-2×MSLN) constructs, which are exemplary embodiments of the multifunctional molecule as provided herein, and CD3×MSLN bispecific constructs, Tristar molecules were more potent Valency of the TAA arm (BMM0449 vs BMM0468 or BMM0456 vs BMM0469) did not have a significant impact on potency. (FIGS. 132A and 132B)

[1396] Across several independent experiments, the ability of Vβ×MSLN bispecifics, which are exemplary embodiments of the multifunctional molecule as provided herein, and CD3×MSLN bispecifics to induce murine CD& T cell expansion was compared. In the presence of plate-bound Mesothelin, expansion induced by 1×1 Vβ×MSLN (BMM0446) & 1×1 CD3×MSLN (BMM0456) were comparable. In a separate experiment (EXP23005483), while robust expansion was observed in the presence of MSLN with 2×2 Vβ×MSLN (BMM0439). 1×1 CD3×MSLN (BMM0456), or 2×1 CD3×MSLN (BMM0469), in the absence of MSLN antigen, there was either no expansion (BMM0439) or it was significantly lower (BMM0456 & BMM0469). In a third separate experiment (EXP23005549), the presence of MSLN significantly increased the potency of expansion for 2×2 Vβ×MSLN (BMM0439), 2×1 Vβ×MSLN (BNM0096), or 2×1 CD3×MSLN (BMM0469). (FIGS. 133A-133D)

[1397] In the presence of plate-bound Mesothelin antigen, both Vβ×IL2×MSLN Tristar, which is an exemplary embodiment of the multifunctional molecule as provided herein, and CD3×MSLN both expanded murine T cells, but CD3 bispecific was more potent. Similarly. CD3×MSLN bispecific was more potent than the Vβ×IL2×MSLN Tristar, which is an exemplary embodiment of the multifunctional molecule as provided herein, in inducing cytotoxicity vs EMT6 tumor cells. (FIG. 134)

[1398] Across several independent experiments, the ability of Vβ×MSLN bispecifics, which are exemplary embodiments of the multifunctional molecule as provided herein, and CD3×MSLN bispecifics to induce cytotoxicity vs a murine tumor cell line was evaluated. In one experiment (EXP2300014), 2×2 Vβ×MSLN (BMM0439), 1×1 Vβ-MSLN (BMM0446), and 1×1 CD3-MSLN (BMM0456) bispecifics were compared. While all three induced potent cytoxicity. 2×2 Vβ-MSLN (BMM0439) was significantly more potent than 1×1 Vβ×MMSLN (BMM0446), and 1×1 CD3×MSLN (BMM0456). Similar results were obtained in a separate assay (EXP23005472) where 2×2 Vβ×MSLN (BMM0439) was shown to be more potent than both 1×1 CD3×MSLN (BMM0456) and 2×1 CD3×MSLN (BMM0469). In two separate assays (EXP23005466 & EXP23005466), increasing the valency of TAA engaging arm (monovalent BMM0456 vs bivalent BMM0469) did not significantly increase potency. In a separate assay (EXP23005562), T cell cytotoxicity was evaluated for 2×2 Vβ×MSLN (BMM0439), 2×1 Vβ×MSLN (BNM0096) and 2×1 CD3×MSLN (BMM0469) constructs. BMM0439 was more potent than BMM0469 & BNM0096. (FIGS. 135A and 135B)

[1399] While CD3×MSLN showed no in vivo anti-tumor activity in the EMT6 model, Vβ×IL2×MSLN Tristar, which is an exemplary embodiment of the multifunctional molecule as provided herein, showed significant anti-tumor activity. (FIGS. 136A and 136B)

[1400] Pharmacokinetics of Vβ×IL2×MSLN Tristar (BMM0449), which is an exemplary embodiment of the multifunctional molecule as provided herein, was evaluated Balb/c mice. Half-life for clearance of the Tristar was measured as 9.9 hours. (FIG. 137)

### Example 62: Exemplary Embodiments of the Multifunctional Molecule as Provided Herein Targeting Gp75 (Tryp1) as a Tumor-Associated Antigen (TAA)

[1401] C57 mice were inoculated with 2e5 B16-F19 cells per mouse. When the mice reached an average of 50 mm³ the mice were then randomized 10 mice per group and dosed with BNM0104 and BNM0869 at 5 mg/kg BIW for 4 weeks along with PBS for the vehicle. Tumor measurements and body weights were collected twice a week.

[1402] 1×1 and 2×2 Vβ×gp75 TCEs, which are exemplary embodiments of the multifunctional molecule as provided herein, were tested in vivo in B16 solid tumor model. The anti-tumor activity was not significantly different than the vehicle control. (FIG. 138)

[1403] C57 mice were inoculated with 2e5 B16-F19 cells per mouse. When the mice reached an average of 50 mm³ the mice were then randomized 10 mice per group. Mice were then dosed with BNM0104, BNM0869 at 5 mg/kg, and BKM0307 at 1 mg/kg BIW for 4 weeks along with PBS for the vehicle. The combination groups were dosed with BKM0307 on day 0, 10, 20 and BNM0104 or BNM0869 were dosed day 3, 7, 13, 17. Tumor measurements and body weights were collected twice a week.

[1404] While 1×1 and 2×2 Vβ×gp75 TCEs, which are exemplary embodiments of the multifunctional molecule as provided herein, in vivo did not show significant anti-tumor activity as single-agents, they showed significant anti-tumor activity when combined with an exemplary multifunctional molecule comprising a Vβ6 binder and IL-2 (BKM0307). Efficacy with the combination (Groups 15 & 16) was higher than all single-agents including an exemplary multifunctional molecule comprising a Vβ6 binder and IL-2 (Group 14). 1×1 and 2×2 Vβ×gp75 T cell engagers are active in B16F10 tumor model when dosed with or following an exemplary multifunctional molecule comprising a Vβ6 binder and IL-2. (FIG. 139)

[1405] C57 mice were inoculated with 2e5 B16-F19 cells per mouse. When the mice reached an average of 50 mm³ the mice were then randomized 10 mice per group then dosed with BNM0094, which is an exemplary embodiment of the multifunctional molecule as provided herein, at 1 and 03 mg/kg and BNM0092 at 2 mg/kg BIW for 4 weeks along with PBS for the vehicle. Tumor measurements and body weights were collected twice a week.

[1406] In the refractory B16F10 model, Vβ×IL2×gp75 Tristar (BNM0094), which is an exemplary embodiment of the multifunctional molecule as provided herein, showed significant anti-tumor activity, whereas CD3×gp75 bispecific (BNM0092) showed limited in vivo anti-tumor activity. Significant anti-tumor activity in refractory B16 mouse with TriSTAR TCE was observed. (FIG. 140)

[1407] Mice were inoculated with 2e5 B16-F19 cells per mouse. When the mice reached an average of 100 mm³ the mice were then randomized 3 mice per group. Mice were injected with BNM0094, which is an exemplary embodiment of the multifunctional molecule as provided herein, at 1 mg/kg or BNM0092 at 2 mg/kg. Day 0 prebleed, 2 hr. 4 hr, 24 hr, 48 hr. 72 hr, 96 hr, and 120 hr serum samples were collected. Pharmacokinetics of Vβ×IL2×gp75 Tristar (BNM0094), which is an exemplary embodiment of the multifunctional molecule as provided herein, and CD3×gp75 bispecific (BNM0092) were evaluated in the B16F10 mice. Half-lives for the Tristar and the CD3-bispecific were 6.2 & 43 hours respectively. (FIGS. 141A-141C)

[1408] Pharmacodynamic properties of Vβ×IL2×gp75 Tristar (BNM0094), which is an exemplary embodiment of the multifunctional molecule as provided herein, and CD3×gp75 bispecific (BNM0092) were assessed in B16F10 mice. Compared to treatment with the CD3×gp75 bispecific (BNM0092), treatment with Vβ×IL2×gp75 Tristar (BNM0094) resulted in a higher levels of CD8+ T cell expansion in the tumor. (FIGS. 142A-142C)

[1409] Mice were inoculated with 2e5 B16-F19 cells per mouse. When the mice reached an average of 100 mm³ the mice were then randomized 5 mice per group. Mice were injected with BNM0094, which is an exemplary embodiment of the multifunctional molecule as provided herein, at 1 mg/kg or BNM0092 at 2 mg/kg BIW, 3 doses. Tumors and whole blood were then collected 3 days after the final dose.

[1410] Compared to treatment with the CD3×gp75 bispecific (BNM0092), treatment with Vβ×IL2×gp75 Tristar (BNM0094) resulted in a higher levels of Vβ13+ T cell expansion in the tumor. (FIGS. 143A and 143B)

[1411] While preferred embodiments of the present invention have been shown and described herein, it will be obvious to those skilled in the art that such embodiments are provided by way of example only. Numerous variations, changes, and substitutions will now occur to those skilled in the art without departing from the invention. It should be understood that various alternatives to the embodiments of the invention described herein may be employed in practicing the invention. It is intended that the following claims define the scope of the invention and that methods and structures within the scope of these claims and their equivalents be covered thereby. Those skilled in the art will recognize, or be able to ascertain using no more than routine experimentation, many equivalents to the specific embodiments of the invention described herein. Such equivalents are intended to be encompassed by the following claims.

TABLE 21
Exemplary Construct Sequences

| | | | |
|---|---|---|---|
| | SEQ | | |
| | ID | | |
| Chain | NO: | Component | Sequence |

TCRVβ/IL15-sushi bispecific

| | | | |
|---|---|---|---|
| Chain 1: | 3517 | Full Sequence | QVQLVQSGAEVKKPGSSVKVSCKASGHDFRLTYIHWVRQAPGQGLE |
| TCRVβ- | | | WMGRVSAGSGNVKYNEKFKGRVTITADTSTSTAYMELSSLRSEDTA |
| Fc_Hole_Cys_ | | | VYYCAVSYYSYDVLDYWGQGTTVTVSSASTKGPSVFPLAPSSKSTS |
| N297A heavy | | | GGTAALGCLVKDYFPEPVTVSWNSGALTSGVHTFPAVLQSSGLYSLS |
| chain (CDRs | | | SVVTVPSSSLGTQTYICNVNHKPSNTKVDKRVEPKSCDKTHTCPPCP |
| underlined) | | | APELLGGPSVFLFPPKPKDTLMISRTPEVTCVVVDVSHEDPEVKFNW |
| | | | YVDGVEVHNAKTKPREEQYASTYRVVSVLTVLHQDWLNGKEYKCK |
| | | | VSNKALPAPIEKTISKAKGQPREPQVCTLPPSREEMTKNQVSLSCAVK |
| | | | GFYPSDIAVEWESNGQPENNYKTTPPVLDSDGSFFLVSKLTVDKSRW |
| | | | QQGNVFSCSVMHEALHNHYTQKSLSLSPGK |
| | 1346 | anti-TCRvβ VH | QVQLVQSGAEVKKPGSSVKVSCKASGHDFRLTYIHWVRQAPGQGLE |
| | | | WMGRVSAGSGNVKYNEKFKGRVTITADTSTSTAYMELSSLRSEDTA |
| | | | VYYCAVSYYSYDVLDYWGQGTTVTVSS |
| | 3649 | Human IgG1 | ASTKGPSVFPLAPSSKSTSGGTAALGCLVKDYFPEPVTVSWNSGALT |
| | | hole cys N297A | SGVHTFPAVLQSSGLYSLSSVVTVPSSSLGTQTYICNVNHKPSNTKVD |
| | | | KRVEPKSCDKTHTCPPCPAPELLGGPSVFLFPPKPKDTLMISRTPEVT |
| | | | CVVVDVSHEDPEVKFNWYVDGVEVHNAKTKPREEQYASTYRVVSV |
| | | | LTVLHQDWLNGKEYKCKVSNKALPAPIEKTISKAKGQPREPQVCTLP |
| | | | PSREEMTKNQVSLSCAVKGFYPSDIAVEWESNGQPENNYKTTPPVLD |
| | | | SDGSFFLVSKLTVDKSRWQQGNVFSCSVMHEALHNHYTQKSLSLSP |
| | | | GK |
| Chain 2: | 3519 | Full Sequence | ITCPPPMSVEHADIWVKSYSLYSRERYICNSGFKRKAGTSSLTECVLN |
| IL15RA_Sushi- | | | KATNVAHWTTPSLKCIRDPALVHQRPAPPSGGSGGGGSGGGSGGGG |
| GS linker- | | | SGGNWVNVISDLKKIEDLIQSMHIDATLYTESDVHPSCKVTAMKCFL |
| IL15-GS | | | LELQVISLESGDASIHDTVENLIILANNSLSSNGNVTESGCKECEELEE |
| linker- | | | KNIKEFLQSFVHIVQMFINTSGGGGSGGGGSDKTHTCPPCPAPELLGG |
| Fc_Knob_Cys_ | | | PSVFLFPPKPKDTLMISRTPEVTCVVVDVSHEDPEVKENWYVDGVEV |
| N297A | | | HNAKTKPREEQYASTYRVVSVLTVLHQDWLNGKEYKCKVSNKALP |
| | | | APIEKTISKAKGQPREPQVYTLPPCREEMTKNQVSLWCLVKGFYPSDI |
| | | | AVEWESNGQPENNYKTTPPVLDSDGSFFLYSKLTVDKSRWQQGNVF |
| | | | SCSVMHEALHNHYTQKSLSLSPGK |
| | 3523 | IL15RA Sushi | ITCPPPMSVEHADIWVKSYSLYSRERYICNSGFKRKAGTSSLTECVLN |
| | | | KATNVAHWTTPSLKCIRDPALVHQRPAPP |
| | 3524 | linker | SGGSGGGGSGGGSGGGGSGG |
| | 2170 | human IL-15 | NWVNVISDLKKIEDLIQSMHIDATLYTESDVHPSCKVTAMKCFLLEL |
| | | | QVISLESGDASIHDTVENLIILANNSLSSNGNVTESGCKECEELEEKNI |
| | | | KEFLQSFVHIVQMFINTS |
| | 3308 | linker | GGGGSGGGGS |
| | 3648 | Human Fc Knob | DKTHTCPPCPAPELLGGPSVFLFPPKPKDTLMISRTPEVTCVVVDVSH |
| | | cys N297A | EDPEVKFNWYVDGVEVHNAKTKPREEQYASTYRVVSVLTVLHQDW |
| | | | LNGKEYKCKVSNKALPAPIEKTISKAKGQPREPQVYTLPPCREEMTK |
| | | | NQVSLWCLVKGFYPSDIAVEWESNGQPENNYKTTPPVLDSDGSFFLY |
| | | | SKLTVDKSRWQQGNVFSCSVMHEALHNHYTQKSLSLSPGK |
| Chain 3: | 3518 | Full Sequence | DIQMTQSPSFLSASVGDRVTITCKASQNVADRVVWHQQKPGKAPKA |
| TCRVβ light | | | LIYSSSHRYKGVPSRFSGSGSGTEFTLTISSLQPEDFATYFCQQFKSYP |
| chain (CDRs | | | LTFGQGTKLEIKRTVAAPSVFIFPPSDEQLKSGTASVVCLLNNFYPRE |
| underlined) | | | AKVQWKVDNALQSGNSQESVTEQDSKDSTYSLSSTLTLSKADYEKH |
| | | | KVYACEVTHQGLSSPVTKSFNRGEC |
| | 1349 | anti-TCRvβ VL | DIQMTQSPSFLSASVGDRVTITCKASQNVADRVVWHQQKPGKAPKA |
| | | | LIYSSSHRYKGVPSRFSGSGSGTEFTLTISSLQPEDFATYFCQQFKSYP |
| | | | LTFGQGTKLEIK |
| | 3644 | Immunoglobulin | RTVAAPSVFIFPPSDEQLKSGTASVVCLLNNFYPREAKVQWKVDNAL |
| | | kappa constant C | QSGNSQESVTEQDSKDSTYSLSSTLILSKADYEKHKVYACEVTHQGL |
| | | region | SSPVTKSFNRGEC |

TCRVβ/IL15 bispecific

| | | | |
|---|---|---|---|
| Chain 1: | 3517 | Full Sequence | QVQLVQSGAEVKKPGSSVKVSCKASGHDFRLTYIHWVRQAPGQGLE |
| TCRVβ- | | | WMGRVSAGSGNVKYNEKFKGRVTITADTSTSTAYMELSSLRSEDTA |
| Fc_Hole_Cys_ | | | VYYCAVSYYSYDVLDYWGQGTTVTVSSASTKGPSVFPLAPSSKSTS |
| N297A heavy | | | GGTAALGCLVKDYFPEPVTVSWNSGALTSGVHTFPAVLQSSGLYSLS |
| chain (CDRs | | | SVVTVPSSSLGTQTYICNVNHKPSNTKVDKRVEPKSCDKTHTCPPCP |
| underlined) | | | APELLGGPSVFLFPPKPKDTLMISRTPEVTCVVVDVSHEDPEVKFNW |
| | | | YVDGVEVHNAKTKPREEQYASTYRVVSVLTVLHQDWLNGKEYKCK |
| | | | VSNKALPAPIEKTISKAKGQPREPQVCTLPPSREEMTKNQVSLSCAVK |
| | | | GFYPSDIAVEWESNGQPENNYKTTPPVLDSDGSFFLVSKLTVDKSRW |
| | | | QQGNVFSCSVMHEALHNHYTQKSLSLSPGK |
| | 1346 | anti-TCRvβ VH | QVQLVQSGAEVKKPGSSVKVSCKASGHDFRLTYIHWVRQAPGQGLE |
| | | | WMGRVSAGSGNVKYNEKFKGRVTITADTSTSTAYMELSSLRSEDTA |
| | | | VYYCAVSYYSYDVLDYWGQGTTVTVSS |
| | 3649 | Human IgG1 | ASTKGPSVFPLAPSSKSTSGGTAALGCLVKDYFPEPVTVSWNSGALT |
| | | hole cys N297A | SGVHTFPAVLQSSGLYSLSSVVTVPSSSLGTQTYICNVNHKPSNTKVD |
| | | | KRVEPKSCDKTHTCPPCPAPELLGGPSVFLFPPKPKDTLMISRTPEVT |
| | | | CVVVDVSHEDPEVKFNWYVDGVEVHNAKTKPREEQYASTYRVVSV |
| | | | LTVLHQDWLNGKEYKCKVSNKALPAPIEKTISKAKGQPREPQVCTLP |
| | | | PSREEMTKNQVSLSCAVKGFYPSDIAVEWESNGQPENNYKTTPPVLD |
| | | | SDGSFFLVSKLTVDKSRWQQGNVFSCSVMHEALHNHYTQKSLSLSP |
| | | | GK |
| Chain 2: | 3520 | Full Sequence | NWVNVISDLKKIEDLIQSMHIDATLYTESDVHPSCKVTAMKCFLLEL |
| IL15-GS | | | QVISLESGDASIHDTVENLIILANNSLSSNGNVTESGCKECEELEEKNI |
| linker- | | | KEFLQSFVHIVQMFINTSGGGGSGGGGSDKTHTCPPCPAPELLGGPSV |
| Fc_Knob_Cys_ | | | FLFPPKPKDTLMISRTPEVTCVVVDVSHEDPEVKFNWYVDGVEVHN |
| N297A | | | AKTKPREEQYASTYRVVSVLTVLHQDWLNGKEYKCKVSNKALPAPI |
| | | | EKTISKAKGQPREPQVYTLPPCREEMTKNQVSLWCLVKGFYPSDIAV |
| | | | EWESNGQPENNYKTTPPVLDSDGSFFLYSKLTVDKSRWQQGNVFSC |
| | | | SVMHEALHNHYTQKSLSLSPGK |
| | 2170 | human IL-15 | NWVNVISDLKKIEDLIQSMHIDATLYTESDVHPSCKVTAMKCFLLEL |
| | | | QVISLESGDASIHDTVENLIILANNSLSSNGNVTESGCKECEELEEKNI |
| | | | KEFLQSFVHIVQMFINTS |
| | 3308 | linker | GGGGSGGGGS |
| | 3648 | Human Fc Knob | DKTHTCPPCPAPELLGGPSVFLFPPKPKDTLMISRTPEVTCVVVDVSH |
| | | cys N297A | EDPEVKFNWYVDGVEVHNAKTKPREEQYASTYRVVSVLTVLHQDW |
| | | | LNGKEYKCKVSNKALPAPIEKTISKAKGQPREPQVYTLPPCREEMTK |
| | | | NQVSLWCLVKGFYPSDIAVEWESNGQPENNYKTTPPVLDSDGSFFLY |
| | | | SKLTVDKSRWQQGNVFSCSVMHEALHNHYTQKSLSLSPGK |
| Chain 3: | 3518 | Full Sequence | DIQMTQSPSFLSASVQDRVTITCKASQNVADRVVWHQQKPGKAPKA |
| TCRVβ light | | | LIYSSSHRYKGVPSRFSGSGSGTEFTLTISSLQPEDFATYFCQQFKSYP |
| chain (CDRs | | | LTFGQGTKLEIKRTVAAPSVFIFPPSDEQLKSGTASVVCLLNNFYPRE |
| underlined) | | | AKVQWKVDNALQSGNSQESVTEQDSKDSTYSLSSTLTLSKADYEKH |
| | | | KVYACEVTHQGLSSPVTKSFNRGEC |
| | 1349 | anti-TCRvβ VL | DIQMTQSPSFLSASVGDRVTITCKASQNVADRVVWHQQKPGKAPKA |
| | | | LIYSSSHRYKGVPSRFSGSGSGTEFTLTISSLQPEDFATYFCQQFKSYP |
| | | | LTFGQGTKLEIK |
| | 3644 | Immunoglobulin | RTVAAPSVFIFPPSDEQLKSGTASVVCLLNNFYPREAKVQWKVDNAL |
| | | kappa constant C | QSGNSQESVTEQDSKDSTYSLSSTLTLSKADYEKHKVYACEVTHQGL |
| | | region | SSPVTKSFNRGEC |

BKM0186 (FIG. 103A)

| | | | |
|---|---|---|---|
| Chain 1 | 3517 | Full Sequence | QVQLVQSGAEVKKPGSSVKVSCKASGHDFRLTYIHWVRQAPGQGLE |
| (heavy chain) | | | WMGRVSAGSGNVKYNEKFKGRVTITADTSTSTAYMELSSLRSEDTA |
| (CDRs | | | VYYCAVSYYSYDVLDYWGQGTTVTVSSASTKGPSVFPLAPSSKSTS |
| underlined) | | | GGTAALGCLVKDYFPEPVTVSWNSGALTSGVHTFPAVLQSSGLYSLS |
| | | | SVVTVPSSSLGTQTYICNVNHKPSNTKVDKRVEPKSCDKTHTCPPCP |
| | | | APELLGGPSVFLFPPKPKDTLMISRTPEVTCVVVDVSHEDPEVKFNW |
| | | | YVDGVEVHNAKTKPREEQYASTYRVVSVLTVLHQDWLNGKEYKCK |
| | | | VSNKALPAPIEKTISKAKGQPREPQVCTLPPSREEMTKNQVSLSCAVK |
| | | | GFYPSDIAVEWESNGQPENNYKTTPPVLDSDGSFFLVSKLTVDKSRW |
| | | | QQGNVFSCSVMHEALHNHYTQKSLSLSPGK |
| | 1346 | anti-TCRvβ VH | QVQLVQSGAEVKKPGSSVKVSCKASGHDFRLTYIHWVRQAPGQGLE |
| | | | WMGRVSAGSGNVKYNEKFKGRVTITADTSTSTAYMELSSLRSEDTA |
| | | | VYYCAVSYYSYDVLDYWGQGTTVTVSS |
| | 3649 | Human IgG1 | ASTKGPSVFPLAPSSKSTSGGTAALGCLVKDYFPEPVTVSWNSGALT |
| | | hole cys N297A | SGVHTFPAVLQSSGLYSLSSVVTVPSSSLGTQTYICNVNHKPSNTKVD |
| | | | KRVEPKSCDKTHTCPPCPAPELLGGPSVFLFPPKPKDTLMISRTPEVT |
| | | | CVVVDVSHEDPEVKFNWYVDGVEVHNAKTKPREEQYASTYRVVSV |
| | | | LTVLHQDWLNGKEYKCKVSNKALPAPIEKTISKAKGQPREPQVCTLP |
| | | | PSREEMTKNQVSLSCAVKGFYPSDIAVEWESNGQPENNYKTTPPVLD |
| | | | SDGSFFLVSKLTVDKSRWQQGNVFSCSVMHEALHNHYTQKSLSLSP |
| | | | GK |
| Chain 2 | 3521 | Full Sequence | APTSSSTKKTQLQLEHLLLDLQMILNGINNYKNPKLTRMLTFKFYMP |
| (IL2-Fc) | | | KKATELKHLQCLEEELKPLEEVLNLAQSKNFHLRPRDLISNINVIVLE |
| | | | LKGSETTFMCEYADETATIVEFLNRWITFAQSIISTLTGGGGSGGGGS |
| | | | DKTHTCPPCPAPELLGGPSVFLFPPKPKDTLMISRTPEVTCVVVDVSH |
| | | | EDPEVKFNWYVDGVEVHNAKTKPREEQYASTYRVVSVLTVLHQDW |
| | | | LNGKEYKCKVSNKALPAPIEKTISKAKGQPREPQVYTLPPCREEMTK |
| | | | NQVSLWCLVKGFYPSDIAVEWESNGQPENNYKTTPPVLDSDGSFFLY |
| | | | SKLTVDKSRWQQGNVFSCSVMHEALHNHYTQKSLSLSPGK |
| | 2270 | IL-2 C125A | APTSSSTKKTQLQLEHLLLDLQMILNGINNYKNPKLTRMLTFKFYMP |
| | | | KKATELKHLQCLEEELKPLEEVLNLAQSKNFHLRPRDLISNINVIVLE |
| | | | LKGSETTFMCEYADETATIVEFLNRWITFAQSIISTLT |
| | 3308 | linker | GGGGGGGGS |
| | 3648 | Human Fc Knob | DKTHTCPPCPAPELLGGPSVFLFPPKPKDTLMISRTPEVTCVVVDVSH |
| | | cys N297A | EDPEVKFNWYVDGVEVHNAKTKPREEQYASTYRVVSVLTVLHQDW |
| | | | LNGKEYKCKVSNKALPAPIEKTISKAKGQPREPQVYTLPPCREEMTK |
| | | | NQVSLWCLVKGFYPSDIAVEWESNGQPENNYKTTPPVLDSDGSFFLY |
| | | | SKLTVDKSRWQQGNVFSCSVMHEALHNHYTQKSLSLSPGK |
| Chain 3 | 3518 | Full Sequence | DIQMTQSPSFLSASVGDRVTITCKASQNVADRVVWHQQKPGKAPKA |
| (light chain) | | | LIYSSSHRYKGVPSRFSGSGSGTEFTLTISSLQPEDFATYFCQQFKSYP |
| (CDRs | | | LTFGQGTKLEIKRTVAAPSVFIFPPSDEQLKSGTASVVCLLNNFYPRE |
| underlined) | | | AKVQWKVDNALQSGNSQESVTEQDSKDSTYSLSSTLTLSKADYEKH |
| | | | KVYACEVTHQGLSSPVTKSFNRGEC |
| | 1349 | anti-TCRvβ VL | DIQMTQSPSFLSASVGDRVTITCKASQNVADRVVWHQQKPGKAPKA |
| | | | LIYSSSHRYKGVPSRFSGSGSGTEFTLTISSLQPEDFATYFCQQFKSYP |
| | | | LTFGQGTKLEIK |
| | 3644 | Immunoglobulin | RTVAAPSVFIFPPSDEQLKSGTASVVCLLNNFYPREAKVQWKVDNAL |
| | | kappa constant C | QSGNSQESVTEQDSKDSTYSLSSTLTLSKADYEKHKVYACEVTHQGL |
| | | region | SSPVTKSFNRGEC |

mBKM0186

| | | | |
|---|---|---|---|
| Chain 1 | 3529 | Full Sequence | QVQLQQSGTELMKPGASVKISCKASGYTFSNYWIEWIKQRPGHGLE |
| (heavy chain) | | | WVGEILPGAGPTNYNEKFKGKATFTADSSSNTAYMQLSSLTSEDSAV |
| (CDRs | | | YYCARTDYDYDWFAYWGQGTLVTVSAAKTTAPSVYPLAPVSGDTT |
| underlined) | | | GSSVTLGCLVKGYFPEPVTLTWNSGSLSSGVHTFPAVLQSDLYTLSSS |
| | | | VTVTSSTWPSQSITCNVAHPASSTKVDKKIEPKSCDKTHTCPPCPAPN |
| | | | AAGGPSVFIFPPKIKDVLMISLSPIVTCVVVDVSEDDPDVQISWFVNN |
| | | | VEVHTAQTQTHREDYNSTLRVVSALPIQHQDWMSGKEFKCKVNNK |
| | | | DLGAPIERTISKPKGSVRAPQVCVLPPPEEEMTKKQVTLSCAVTDFMP |
| | | | EDIYVEWTNNGKTELNYKNTEPVLDSDGSYFMVSKLRVEKKNWVE |
| | | | RNSYSCSVVHEGLHNHHTTKSFSRTPGKEPEA |
| | 3548 | Full Sequence | QVQLQQSGTELMKPGASVKISCKASGYTFSNYWIEWIKQRPGHGLE |
| | | without tag | WVGEILPGAGPTNYNEKFKGKATFTADSSSNTAYMQLSSLTSEDSAV |
| | | | YYCARTDYDYDWFAYWGQGTLVTVSAAKTTAPSVYPLAPVSGDTT |
| | | | GSSVTLGCLVKGYFPEPVTLTWNSGSLSSGVHTFPAVLQSDLYTLSSS |
| | | | VTVTSSTWPSQSITCNVAHPASSTKVDKKIEPKSCDKTHTCPPCPAPN |
| | | | AAGGPSVFIFPPKIKDVLMISLSPIVTCVVVDVSEDDPDVQISWFVNN |
| | | | VEVHTAQTQTHREDYNSTLRVVSALPIQHQDWMSGKEFKCKVNNK |
| | | | DLGAPIERTISKPKGSVRAPQVCVLPPPEEEMTKKQVTLSCAVTDFMP |
| | | | EDIYVEWTNNGKTELNYKNTEPVLDSDGSYFMVSKLRVEKKNWVE |
| | | | RNSYSCSVVHEGLHNHHTTKSFSRTPGK |
| | 3530 | anti-TCRvβ VH | QVQLQQSGTELMKPGASVKISCKASGYTFSNYWIEWIKQRPGHGLE |
| | | from murine | WVGEILPGAGPTNYNEKFKGKATFTADSSSNTAYMQLSSLTSEDSAV |
| | | MR5-2 | YYCARTDYDYDWFAYWGQGTLVTVSAAKTTAPSVYPLAPVSGDTT |
| | | | GSSVTLGCLVKGYFPEPVTLTWNSGSLSSGVHTFPAVLQSDLYTLSSS |
| | | | VTVTSS |
| | 3531 | mouse Fc heavy | TWPSQSITCNVAHPASSTKVDKKIEPKSCDKTHTCPPCPAPNAAGGPS |
| | | chain comprising | VFIFPPKIKDVLMISLSPIVTCVVVDVSEDDPDVQISWFVNNVEVHTA |
| | | LALAPG | QTQTHREDYNSTLRVVSALPIQHQDWMSGKEFKCKVNNKDLGAPIE |
| | | mutations | RTISKPKGSVRAPQVCVLPPPEEEMTKKQVTLSCAVTDFMPEDIYVE |
| | | (L234A L235A | WTNNGKTELNYKNTEPVLDSDGSYFMVSKLRVEKKNWVERNSYSC |
| | | and P329G) | SVVHEGLHNHHTTKSFSRTPGK |
| | 3547 | Tag | EPEA |
| Chain 2 | 3532 | Full Sequence | APTSSSTKKTQLQLEHLLLDLQMILNGINNYKNPKLTRMLTFKFYMP |
| (IL2-Fc) | | | KKATELKHLQCLEEELKPLEEVLNLAQSKNFHLRPRDLISNINVIVLE |
| | | | LKGSETTFMCEYADETATIVEFLNRWITFCQSIISTLTGGGGSGGGGS |
| | | | DKTHTCPPCPAPNAAGGPSVFIFPPKIKDVLMISLSPIVTCVVVDVSED |
| | | | DPDVQISWFVNNVEVHTAQTQTHREDYNSTLRVVSALPIQHQDWMS |
| | | | GKEFKCKVNNKDLGAPIERTISKPKGSVRAPQVYVLPPCEEEMTKKQ |
| | | | VTLWCMVTDFMPEDIYVEWTNNGKTELNYKNTEPVLDSDGSYFMY |
| | | | SKLRVEKKNWVERNSYSCSVVHEGLHNHHTTKSFSRTPGKGGGGSH |
| | | | HHHHHHH |
| | 3549 | Full Sequence | APTSSSTKKTQLQLEHLLLDLQMILNGINNYKNPKLTRMLTFKFYMP |
| | | without tag | KKATELKHLQCLEEELKPLEEVLNLAQSKNFHLRPRDLISNINVIVLE |
| | | | LKGSETTFMCEYADETATIVEFLNRWITFCQSIISTLTGGGGSGGGGS |
| | | | DKTHTCPPCPAPNAAGGPSVFIFPPKIKDVLMISLSPIVTCVVVDVSED |
| | | | DPDVQISWFVNNVEVHTAQTQTHREDYNSTLRVVSALPIQHQDWMS |
| | | | GKEFKCKVNNKDLGAPIERTISKPKGSVRAPQVYVLPPCEEEMTKKQ |
| | | | VTLWCMVTDFMPEDIYVEWTNNGKTELNYKNTEPVLDSDGSYFMY |
| | | | SKLRVEKKNWVERNSYSCSVVHEGLHNHHTTKSFSRTPGK |
| | 2191 | IL-2 | APTSSSTKKTQLQLEHLLLDLQMILNGINNYKNPKLTRMLTFKFYMP |
| | | | KKATELKHLQCLEEELKPLEEVLNLAQSKNFHLRPRDLISNINVIVLE |
| | | | LKGSETTFMCEYADETATIVEFLNRWITFCQSIISTLT |
| | 3308 | linker | GGGGSGGGGS |
| | 3533 | mouse Fc heavy | DKTHTCPPCPAPNAAGGPSVFIFPPKIKDVLMISLSPIVTCVVVDVSED |
| | | chain comprising | DPDVQISWFVNNVEVHTAQTQTHREDYNSTLRVVSALPIQHQDWMS |
| | | LALAPG | GKEFKCKVNNKDLGAPIERTISKPKGSVRAPQVYVLPPCEEEMTKKQ |
| | | mutations | VTLWCMVTDFMPEDIYVEWTNNGKTELNYKNTEPVLDSDGSYFMY |
| | | (L234A L235A | SKLRVEKKNWVERNSYSCSVVHEGLHNHHTTKSFSRTPGK |
| | | and P329G) | |
| | 3534 | Tag | GGGGSHHHHHHHH |
| Chain 3 | 3526 | Full Sequence | DIVMSQSPSSLAVSVGEKVTMSCKSSQSLLYSGNQKNYLAWYQQKP |
| (light chain) | | | GQSPKLLIYWASTRESGVPDRFTGSGSGTDFTLTINSVKAEDLTVYYC |
| (CDRs | | | QQYYGYPRTFGGGTKVEIKRADAAPTVSIFPPSSEQLTSGGASVVCFL |
| underlined) | | | NNFYPKDINVKWKIDGSERQNGVLNSWTDQDSKDSTYSMSSTLTLT |
| | | | KDEYERHNSYTCEATHKTSTSPIVKSFNRNEC |
| | 3527 | anti-TCRvβ VL | DIVMSQSPSSLAVSVGEKVTMSCKSSQSLLYSGNQKNYLAWYQQKP |
| | | from murine | GQSPKLLIYWASTRESGVPDRFTGSGSGTDFTLTINSVKAEDLTVYYC |
| | | MR5-2 | QQYYGYPRTFGGGTKVEIK |
| | 3528 | Immunoglobulin | RADAAPTVSIFPPSSEQLTSGGASVVCFLNNFYPKDINVKWKIDGSER |
| | | constant region | QNGVLNSWTDQDSKDSTYSMSSTLTLTKDEYERHNSYTCEATHKTS |
| | | | TSPIVKSFNRNEC |

mBKM0281

| | | | |
|---|---|---|---|
| Chain 1 | 3536 | Full Sequence | QVQLQQSGTELMKPGASVKISCKASGYTFSNYWIEWIKQRPGHGLE |
| (heavy chain) | | | WVGEILPGAGPTNYNEKFKGKATFTADSSSNTAYMQLSSLTSEDSAV |
| (CDRs | | | YYCARTDYDYDWFAYWGQGTLVTVSAAKTTAPSVYPLAPVSGDTT |
| underlined) | | | GSSVTLGCLVKGYFPEPVTLTWNSGSLSSGVHTFPAVLQSDLYTLSSS |
| | | | VTVTSSTWPSQSITCNVAHPASSTKVDKKIEPKSCDKTHTCPPCPAPN |
| | | | AAGGPSVFIFPPKIKDVLMISLSPIVTCVVVDVSEDDPDVQISWFVNN |
| | | | VEVHTAQTQTHREDYNSTLRVVSALPIQHQDWMSGKEFKCKVNNK |
| | | | DLGAPIERTISKPKGSVRAPQVYVLPPPEEEMTKKQVTLTCMVTDFM |
| | | | PEDIYVEWTNNGKTELNYKNTEPVLDSDGSYFMYSKLRVEKKNWV |
| | | | ERNSYSCSVVHEGLHNHHTTKSFSRTPGKEPEA |
| | 3530 | anti-TCRvβ VH | QVQLQQSGTELMKPGASVKISCKASGYTFSNYWIEWIKQRPGHGLE |
| | | from murine | WVGEILPGAGPTNYNEKFKGKATFTADSSSNTAYMQLSSLTSEDSAV |
| | | MR5-2 | YYCARTDYDYDWFAYWGQGTLVTVSAAKTTAPSVYPLAPVSGDTT |
| | | | GSSVTLGCLVKGYFPEPVTLTWNSGSLSSGVHTFPAVLQSDLYTLSSS |
| | | | VTVTSS |
| | 3537 | mouse Fc heavy | TWPSQSITCNVAHPASSTKVDKKIEPKSCDKTHTCPPCPAPNAAGGPS |
| | | chain comprising | VFIFPPKIKDVLMISLSPIVTCVVVDVSEDDPDVQISWFVNNVEVHTA |
| | | LALAPG | QTQTHREDYNSTLRVVSALPIQHQDWMSGKEFKCKVNNKDLGAPIE |
| | | mutations | RTISKPKGSVRAPQVYVLPPPEEEMTKKQVTLTCMVTDFMPEDIYVE |
| | | (L234A L235A | WTNNGKTELNYKNTEPVLDSDGSYFMYSKLRVEKKNWVERNSYSC |
| | | and P329G) | SVVHEGLHNHHTTKSFSRTPGKEPEA |
| Chain 2 | 3535 | Full Sequence | DIVMSQSPSSLAVSVGEKVTMSCKSSQSLLYSGNQKNYLAWYQQKP |
| (light chain- | | | GQSPKLLIYWASTRESGVPDRFTGSGSGTDFTLTINSVKAEDLTVYYC |
| IL2) | | | QQYYGYPRTFGGGTKVEIKRADAAPTVSIFPPSSEQLTSGGASVVCFL |
| (CDRs | | | NNFYPKDINVKWKIDGSERQNGVLNSWTDQDSKDSTYSMSSTLTLT |
| underlined) | | | KDEYERHNSYTCEATHKTSTSPIVKSFNRNECGGGGSGGGGSGGGGS |
| | | | APTSSSTKKTQLQLEHLLLDLQMILNGINNYKNPKLTRMLTFKFYMP |
| | | | KKATELKHLQCLEEELKPLEEVLNLAQSKNFHLRPRDLISNINVIVLE |
| | | | LKGSETTFMCEYADETATIVEFLNRWITFCQSIISTLT |
| | 3527 | anti-TCRvβ VL | DIVMSQSPSSLAVSVGEKVTMSCKSSQSLLYSGNQKNYLAWYQQKP |
| | | from murine | GQSPKLLIYWASTRESGVPDRFTGSGSGTDFTLTINSVKAEDLTVYYC |
| | | MR5-2 | QQYYGYPRTFGGGTKVEIK |
| | 3528 | Immunoglobulin | RADAAPTVSIFPPSSEQLTSGGASVVCFLNNFYPKDINVKWKIDGSER |
| | | constant region | QNGVLNSWTDQDSKDSTYSMSSTLTLTKDEYERHNSYTCEATHKTS |
| | | | TSPIVKSFNRNEC |
| | 3309 | linker | GGGGSGGGGSGGGGS |
| | 2191 | IL-2 | APTSSSTKKTQLQLEHLLLDLQMILNGINNYKNPKLTRMLTFKFYMP |
| | | | KKATELKHLQCLEEELKPLEEVLNLAQSKNFHLRPRDLISNINVIVLE |
| | | | LKGSETTFMCEYADETATIVEFLNRWITFCQSIISTLT |

BMM0317(IL-7)

| | | | |
|---|---|---|---|
| Chain 1: | 3517 | Full Sequence | QVQLVQSGAEVKKPGSSVKVSCKASGHDFRLTYIHWVRQAPGQGLE |
| TCRVβ- | | | WMGRVSAGSGNVKYNEKFKGRVTITADTSTSTAYMELSSLRSEDTA |
| Fc_Hole_Cys_ | | | VYYCAVSYYSYDVLDYWGQGTTVTVSSASTKGPSVFPLAPSSKSTS |
| N297A heavy | | | GGTAALGCLVKDYFPEPVTVSWNSGALTSGVHTFPAVLQSSGLYSLS |
| chain (CDRs | | | SVVTVPSSSLGTQTYICNVNHKPSNTKVDKRVEPKSCDKTHTCPPCP |
| underlined) | | | APELLGGPSVFLFPPKPKDTLMISRTPEVTCVVVDVSHEDPEVKFNW |
| | | | YVDGVEVHNAKTKPREEQYASTYRVVSVLTVLHQDWLNGKEYKCK |
| | | | VSNKALPAPIEKTISKAKGQPREPQVCTLPPSREEMTKNQVSLSCAVK |
| | | | GFYPSDIAVEWESNGQPENNYKTTPPVLDSDGSFFLVSKLTVDKSRW |
| | | | QQGNVFSCSVMHEALHNHYTQKSLSLSPGK |
| | 1346 | anti-TCRvβ VH | QVQLVQSGAEVKKPGSSVKVSCKASGHDFRLTYIHWVRQAPGQGLE |
| | | | WMGRVSAGSGNVKYNEKFKGRVTITADTSTSTAYMELSSLRSEDTA |
| | | | VYYCAVSYYSYDVLDYWGQGTTVTVSS |
| | 3649 | Human IgG1 | ASTKGPSVFPLAPSSKSTSGGTAALGCLVKDYFPEPVTVSWNSGALT |
| | | hole cys N297A | SGVHTFPAVLQSSGLYSLSSVVTVPSSSLGTQTYICNVNHKPSNTKVD |
| | | | KRVEPKSCDKTHTCPPCPAPELLGGPSVFLFPPKPKDTLMISRTPEVT |
| | | | CVVVDVSHEDPEVKFNWYVDGVEVHNAKTKPREEQYASTYRVVSV |
| | | | LTVLHQDWLNGKEYKCKVSNKALPAPIEKTISKAKGQPREPQVCTLP |
| | | | PSREEMTKNQVSLSCAVKGFYPSDIAVEWESNGQPENNYKTTPPVLD |
| | | | SDGSFFLVSKLTVDKSRWQQGNVFSCSVMHEALHNHYTQKSLSLSP |
| | | | GK |
| Chain 2: | 3539 | Full Sequence | DCDIEGKDGKQYESVLMVSIDQLLDSMKEIGSNCLNNEFNFFKRHIC |
| IL-7-GS | | | DANKEGMFLFRAARKLRQFLKMNSTGDFDLHLLKVSEGTTILLNCT |
| linker-IL15- | | | GQVKGRKPAALGEAQPTKSLEENKSLKEQKKLNDLCFLKRLLQEIKT |
| GS linker- | | | CWNKILMGTKEHGGGGSGGGGSDKTHTCPPCPAPELLGGPSVFLFPP |
| Fc_Knob_Cys_ | | | KPKDTLMISRTPEVTCVVVDVSHEDPEVKFNWYVDGVEVHNAKTKP |
| N297A | | | REEQYASTYRVVSVLTVLHQDWLNGKEYKCKVSNKALPAPIEKTIS |
| | | | KAKGQPREPQVYTLPPCREEMTKNQVSLWCLVKGFYPSDIAVEWES |
| | | | NGQPENNYKTTPPVLDSDGSFFLYSKLTVDKSRWQQGNVFSCSVMH |
| | | | EALHNHYTQKSLSLSPGK |
| | 3540 | IL-7 | DCDIEGKDGKQYESVLMVSIDQLLDSMKEIGSNCLNNEFNFFKRHIC |
| | | | DANKEGMFLFRAARKLRQFLKMNSTGDFDLHLLKVSEGTTILLNCT |
| | | | GQVKGRKPAALGEAQPTKSLEENKSLKEQKKLNDLCFLKRLLQEIKT |
| | | | CWNKILMGTKEH |
| | 3308 | linker | GGGGSGGGGS |
| | 3648 | Human Fc Knob | DKTHTCPPCPAPELLGGPSVFLFPPKPKDTLMISRTPEVTCVVVDVSH |
| | | cys N297A | EDPEVKFNWYVDGVEVHNAKTKPREEQYASTYRVVSVLTVLHQDW |
| | | | LNGKEYKCKVSNKALPAPIEKTISKAKGQPREPQVYTLPPCREEMTK |
| | | | NQVSLWCLVKGFYPSDIAVEWESNGQPENNYKTTPPVLDSDGSFFLY |
| | | | SKLTVDKSRWQQGNVFSCSVMHEALHNHYTQKSLSLSPGK |
| Chain 3: | 3518 | Full Sequence | DIQMTQSPSFLSASVGDRVTITCKASQNVADRVVWHQQKPGKAPKA |
| TCRVβ light | | | LIYSSSHRYKGVPSRFSGSGSGTEFTLTISSLQPEDFATYFCQQFKSYP |
| chain (CDRs | | | LTFGQGTKLEIKRTVAAPSVFIFPPSDEQLKSGTASVVCLLNNFYPRE |
| underlined) | | | AKVQWKVDNALQSGNSQESVTEQDSKDSTYSLSSTLTLSKADYEKH |
| | | | KVYACEVTHQGLSSPVTKSFNRGEC |
| | 1349 | anti-TCRvβ VL | DIQMTQSPSFLSASVGDRVTITCKASQNVADRVVWHQQKPGKAPKA |
| | | | LIYSSSHRYKGVPSRFSGSGSGTEFTLTISSLQPEDFATYFCQQFKSYP |
| | | | LTFGQGTKLEIK |
| | 3644 | Immunoglobulin | RTVAAPSVFIFPPSDEQLKSGTASVVCLLNNFYPREAKVQWKVDNAL |
| | | kappa constant C | QSGNSQESVTEQDSKDSTYSLSSTLTLSKADYEKHKVYACEVTHQGL |
| | | region | SSPVTKSFNRGEC |

BLM0319(IL-12)

| | | | |
|---|---|---|---|
| Chain 1: | 3517 | Full Sequence | QVQLVQSGAEVKKPGSSVKVSCKASGHDFRLTYIHWVRQAPGQGLE |
| TCRVβ- | | | WMGRVSAGSGNVKYNEKFKGRVTITADTSTSTAYMELSSLRSEDTA |
| Fc_Hole_Cys_ | | | VYYCAVSYYSYDVLDYWGQGTTVTVSSASTKGPSVFPLAPSSKSTS |
| N297A heavy | | | GGTAALGCLVKDYFPEPVTVSWNSGALTSGVHTFPAVLQSSGLYSLS |
| chain (CDRs | | | SVVTVPSSSLGTQTYICNVNHKPSNTKVDKRVEPKSCDKTHTCPPCP |
| underlined) | | | APELLGGPSVFLFPPKPKDTLMISRTPEVTCVVVDVSHEDPEVKFNW |
| | | | YVDGVEVHNAKTKPREEQYASTYRVVSVLTVLHQDWLNGKEYKCK |
| | | | VSNKALPAPIEKTISKAKGQPREPQVCTLPPSREEMTKNQVSLSCAVK |
| | | | GFYPSDIAVEWESNGQPENNYKTTPPVLDSDGSFFLVSKLTVDKSRW |
| | | | QQGNVFSCSVMHEALHNHYTQKSLSLSPGK |
| | 1346 | anti-TCRvβ VH | QVQLVQSGAEVKKPGSSVKVSCKASGHDFRLTYIHWVRQAPGQGLE |
| | | | WMGRVSAGSGNVKYNEKFKGRVTITADTSTSTAYMELSSLRSEDTA |
| | | | VYYCAVSYYSYDVLDYWGQGTTVTVSS |
| | 3649 | Human IgG1 | ASTKGPSVFPLAPSSKSTSGGTAALGCLVKDYFPEPVTVSWNSGALT |
| | | hole cys N297A | SGVHTFPAVLQSSGLYSLSSVVTVPSSSLGTQTYICNVNHKPSNTKVD |
| | | | KRVEPKSCDKTHTCPPCPAPELLGGPSVFLFPPKPKDTLMISRTPEVT |
| | | | CVVVDVSHEDPEVKFNWYVDGVEVHNAKTKPREEQYASTYRVVSV |
| | | | LTVLHQDWLNGKEYKCKVSNKALPAPIEKTISKAKGQPREPQVCTLP |
| | | | PSREEMTKNQVSLSCAVKGFYPSDIAVEWESNGQPENNYKTTPPVLD |
| | | | SDGSFFLVSKLTVDKSRWQQGNVFSCSVMHEALHNHYTQKSLSLSP |
| | | | GK |
| Chain 2: | 3541 | Full Sequence | IWELKKDVYVVELDWYPDAPGEMVVLTCDTPEEDGITWTLDQSSEV |
| IL-12-GS | | | LGSGKTLTIQVKEFGDAGQYTCHKGGEVLSHSLLLLHKKEDGIWSTD |
| linker-IL15- | | | ILKDQKEPKNKTFLRCEAKNYSGRFTCWWLTTISTDLTFSVKSSRGSS |
| GS linker- | | | DPQGVTCGAATLSAERVRGDNKEYEYSVECQEDSACPAAEESLPIEV |
| Fc_Knob_Cys_ | | | MVDAVHKLKYENYTSSFFIRDIIKPDPPKNLQLKPLKNSRQVEVSWE |
| N297A | | | YPDTWSTPHSYFSLTFCVQVQGKSKREKKDRVFTDKTSATVICRKNA |
| | | | SISVRAQDRYYSSSWSEWASVPCSGGGGSGGGGSGGGGSRNLPVAT |
| | | | PDPGMFPCLHHSQNLLRAVSNMLQKARQTLEFYPCTSEEIDHEDITK |
| | | | DKTSTVEACLPLELTKNESCLNSRETSFITNGSCLASRKTSFMMALCL |
| | | | SSIYEDLKMYQVEFKTMNAKLLMDPKRQIFLDQNMLAVIDELMQAL |
| | | | NFNSETVPQKSSLEEPDFYKTKIKLCILLHAFRIRAVTIDRVMSYLNAS |
| | | | GGGGSGGGGSDKTHTCPPCPAPELLGGPSVFLFPPKPKDTLMISRTPE |
| | | | VTCVVVDVSHEDPEVKFNWYVDGVEVHNAKTKPREEQYASTYRVV |
| | | | SVLTVLHQDWLNGKEYKCKVSNKALPAPIEKTISKAKGQPREPQVY |
| | | | TLPPCREEMTKNQVSLWCLVKGFYPSDIAVEWESNGQPENNYKTTP |
| | | | PVLDSDGSFFLYSKLTVDKSRWQQGNVFSCSVMHEALHNHYTQKSL |
| | | | SLSPGK |
| | 3542 | IL-12 | IWELKKDVYVVELDWYPDAPGEMVVLTCDTPEEDGITWTLDQSSEV |
| | | | LGSGKTLTIQVKEFGDAGQYTCHKGGEVLSHSLLLLHKKEDGIWSTD |
| | | | ILKDQKEPKNKTFLRCEAKNYSGRFTCWWLTTISTDLTFSVKSSRGSS |
| | | | DPQGVTCGAATLSAERVRGDNKEYEYSVECQEDSACPAAEESLPIEV |
| | | | MVDAVHKLKYENYTSSFFIRDIIKPDPPKNLQLKPLKNSRQVEVSWE |
| | | | YPDTWSTPHSYFSLTFCVQVQGKSKREKKDRVFTDKTSATVICRKNA |
| | | | SISVRAQDRYYSSSWSEWASVPCSGGGGSGGGGSGGGGSRNLPVAT |
| | | | PDPGMFPCLHHSQNLLRAVSNMLQKARQTLEFYPCTSEEIDHEDITK |
| | | | DKTSTVEACLPLELTKNESCLNSRETSFITNGSCLASRKTSFMMALCL |
| | | | SSIYEDLKMYQVEFKTMNAKLLMDPKRQIFLDQNMLAVIDELMQAL |
| | | | NFNSETVPQKSSLEEPDFYKTKIKLCILLHAFRIRAVTIDRVMSYLNAS |
| | 3543 | IL-12 beta | IWELKKDVYVVELDWYPDAPGEMVVLTCDTPEEDGITWTLDQSSEV |
| | | subunit | LGSGKTLTIQVKEFGDAGQYTCHKGGEVLSHSLLLLHKKEDGIWSTD |
| | | | ILKDQKEPKNKTFLRCEAKNYSGRFTCWWLTTISTDLTFSVKSSRGSS |
| | | | DPQGVTCGAATLSAERVRGDNKEYEYSVECQEDSACPAAEESLPIEV |
| | | | MVDAVHKLKYENYTSSFFIRDIIKPDPPKNLQLKPLKNSRQVEVSWE |
| | | | YPDTWSTPHSYFSLTFCVQVQGKSKREKKDRVFTDKTSATVICRKNA |
| | | | SISVRAQDRYYSSSWSEWASVPC |
| | 3544 | Linker | SGGGGSGGGGSGGGGS |
| | 3545 | IL-12 alpha | RNLPVATPDPGMFPCLHHSQNLLRAVSNMLQKARQTLEFYPCTSEEI |
| | | subunit | DHEDITKDKTSTVEACLPLELTKNESCLNSRETSFITNGSCLASRKTSF |
| | | | MMALCLSSIYEDLKMYQVEFKTMNAKLLMDPKRQIFLDQNMLAVI |
| | | | DELMQALNENSETVPQKSSLEEPDFYKTKIKLCILLHAFRIRAVTIDR |
| | | | VMSYLNAS |
| | 3308 | linker | GGGGGGGGS |
| | 3648 | Human Fc Knob | DKTHTCPPCPAPELLGGPSVFLFPPKPKDTLMISRTPEVTCVVVDVSH |
| | | cys N297A | EDPEVKFNWYVDGVEVHNAKTKPREEQYASTYRVVSVLTVLHQDW |
| | | | LNGKEYKCKVSNKALPAPIEKTISKAKGQPREPQVYTLPPCREEMTK |
| | | | NQVSLWCLVKGFYPSDIAVEWESNGQPENNYKTTPPVLDSDGSFFLY |
| | | | SKLTVDKSRWQQGNVFSCSVMHEALHNHYTQKSLSLSPGK |
| Chain 3: | 3518 | Full Sequence | DIQMTQSPSFLSASVGDRVTITCKASQNVADRVVWHQQKPGKAPKA |
| TCRVβ light | | | LIYSSSHRYKGVPSRFSGSGSGTEFTLTISSLQPEDFATYFCQQFKSYP |
| chain (CDRs | | | LTFGQGTKLEIKRTVAAPSVFIFPPSDEQLKSGTASVVCLLNNFYPRE |
| underlined) | | | AKVQWKVDNALQSGNSQESVTEQDSKDSTYSLSSTLTLSKADYEKH |
| | | | KVYACEVTHQGLSSPVTKSFNRGEC |
| | 1349 | anti-TCRvβ VL | DIQMTQSPSFLSASVGDRVTITCKASQNVADRVVWHQQKPGKAPKA |
| | | | LIYSSSHRYKGVPSRFSGSGSGTEFTLTISSLQPEDFATYFCQQFKSYP |
| | | | LTFGQGTKLEIK |
| | 3644 | Immunoglobulin | RTVAAPSVFIFPPSDEQLKSGTASVVCLLNNFYPREAKVQWKVDNAL |
| | | kappa constant C | QSGNSQESVTEQDSKDSTYSLSSTLTLSKADYEKHKVYACEVTHQGL |
| | | region | SSPVTKSFNRGEC |

BLM0321(IL-21)

| | | | |
|---|---|---|---|
| Chain 1: | 3517 | Full Sequence | QVQLVQSGAEVKKPGSSVKVSCKASGHDFRLTYIHWVRQAPGQGLE |
| TCRVβ- | | | WMGRVSAGSGNVKYNEKFKGRVTITADTSTSTAYMELSSLRSEDTA |
| Fc_Hole_Cys_ | | | VYYCAVSYYSYDVLDYWGQGTTVTVSSASTKGPSVFPLAPSSKSTS |
| N297A heavy | | | GGTAALGCLVKDYFPEPVTVSWNSGALTSGVHTFPAVLQSSGLYSLS |
| chain (CDRs | | | SVVTVPSSSLGTQTYICNVNHKPSNTKVDKRVEPKSCDKTHTCPPCP |
| underlined) | | | APELLGGPSVFLFPPKPKDTLMISRTPEVTCVVVDVSHEDPEVKFNW |
| | | | YVDGVEVHNAKTKPREEQYASTYRVVSVLTVLHQDWLNGKEYKCK |
| | | | VSNKALPAPIEKTISKAKGQPREPQVCTLPPSREEMTKNQVSLSCAVK |
| | | | GFYPSDIAVEWESNGQPENNYKTTPPVLDSDGSFFLVSKLTVDKSRW |
| | | | QQGNVFSCSVMHEALHNHYTQKSLSLSPGK |
| | 1346 | anti-TCRvβ VH | QVQLVQSGAEVKKPGSSVKVSCKASGHDFRLTYIHWVRQAPGQGLE |
| | | | WMGRVSAGSGNVKYNEKFKGRVTITADTSTSTAYMELSSLRSEDTA |
| | | | VYYCAVSYYSYDVLDYWGQGTTVTVSS |
| | 3649 | Human IgG1 | ASTKGPSVFPLAPSSKSTSGGTAALGCLVKDYFPEPVTVSWNSGALT |
| | | hole cys N297A | SGVHTFPAVLQSSGLYSLSSVVTVPSSSLGTQTYICNVNHKPSNTKVD |
| | | | KRVEPKSCDKTHTCPPCPAPELLGGPSVFLFPPKPKDTLMISRTPEVT |
| | | | CVVVDVSHEDPEVKFNWYVDGVEVHNAKTKPREEQYASTYRVVSV |
| | | | LTVLHQDWLNGKEYKCKVSNKALPAPIEKTISKAKGQPREPQVCTLP |
| | | | PSREEMTKNQVSLSCAVKGFYPSDIAVEWESNGQPENNYKTTPPVLD |
| | | | SDGSFFLVSKLTVDKSRWQQGNVFSCSVMHEALHNHYTQKSLSLSP |
| | | | GK |
| Chain 2: | 3546 | Full Sequence | QGQDRHMIRMRQLIDIVDQLKNYVNDLVPEFLPAPEDVETNCEWSA |
| IL-21-GS | | | FSCFQKAQLKSANTGNNERIINVSIKKLKRKPPSTNAGRRQKHRLTCP |
| linker-IL15- | | | SCDSYEKKPPKEFLERFKSLLQKMIHQHLSSRTHGSEDSGGGGSGGG |
| GS linker- | | | GSDKTHTCPPCPAPELLGGPSVFLFPPKPKDTLMISRTPEVTCVVVDV |
| Fc_Knob_Cys_ | | | SHEDPEVKFNWYVDGVEVHNAKTKPREEQYASTYRVVSVLTVLHQ |
| N297A | | | DWLNGKEYKCKVSNKALPAPIEKTISKAKGQPREPQVYTLPPCREEM |
| | | | TKNQVSLWCLVKGFYPSDIAVEWESNGQPENNYKTTPPVLDSDGSFF |
| | | | LYSKLTVDKSRWQQGNVFSCSVMHEALHNHYTQKSLSLSPGK |
| | 2193 | IL-21 | QGQDRHMIRMRQLIDIVDQLKNYVNDLVPEFLPAPEDVETNCEWSA |
| | | | FSCFQKAQLKSANTGNNERIINVSIKKLKRKPPSTNAGRRQKHRLTCP |
| | | | SCDSYEKKPPKEFLERFKSLLQKMIHQHLSSRTHGSEDS |
| | 3308 | linker | GGGGSGGGGS |
| | 3648 | Human Fc Knob | DKTHTCPPCPAPELLGGPSVFLFPPKPKDTLMISRTPEVTCVVVDVSH |
| | | cys N297A | EDPEVKFNWYVDGVEVHNAKTKPREEQYASTYRVVSVLTVLHQDW |
| | | | LNGKEYKCKVSNKALPAPIEKTISKAKGQPREPQVYTLPPCREEMTK |
| | | | NQVSLWCLVKGFYPSDIAVEWESNGQPENNYKTTPPVLDSDGSFFLY |
| | | | SKLTVDKSRWQQGNVFSCSVMHEALHNHYTQKSLSLSPGK |
| Chain 3: | 3518 | Full Sequence | DIQMTQSPSFLSASVGDRVTITCKASQNVADRVVWHQQKPGKAPKA |
| TCRVβ light | | | LIYSSSHRYKGVPSRFSGSGSGTEFTLTISSLQPEDFATYFCQQFKSYP |
| chain (CDRs | | | LTFGQGTKLEIKRTVAAPSVFIFPPSDEQLKSGTASVVCLLNNFYPRE |
| underlined) | | | AKVQWKVDNALQSGNSQESVTEQDSKDSTYSLSSTLTLSKADYEKH |
| | | | KVYACEVTHQGLSSPVTKSFNRGEC |
| | 1349 | anti-TCRvβ VL | DIQMTQSPSFLSASVGDRVTITCKASQNVADRVVWHQQKPGKAPKA |
| | | | LIYSSSHRYKGVPSRFSGSGSGTEFTLTISSLQPEDFATYFCQQFKSYP |
| | | | LTFGQGTKLEIK |
| | 3644 | Immunoglobulin | RTVAAPSVFIFPPSDEQLKSGTASVVCLLNNFYPREAKVQWKVDNAL |
| | | kappa constant C | QSGNSQESVTEQDSKDSTYSLSSTLTLSKADYEKHKVYACEVTHQGL |
| | | region | SSPVTKSFNRGEC |

Exemplary Multifunctional Molecule 1

| | | | |
|---|---|---|---|
| Chain 1: heavy | 3791 | Full Sequence | QVQLVQSGAEVKKPGSSVKVSCKASGHDFRLTYIHWVRQAPGQGLE |
| chain | | | WMGRVSAGSGNVKYNEKFKGRVTITADTSTSTAYMELSSLRSEDTA |
| | | | VYYCAVSYYSYDVLDYWGQGTTVTVSSASTKGPSVFPLAPSSKSTS |
| | | | GGTAALGCLVKDYFPEPVTVSWNSGALTSGVHTFPAVLQSSGLYSLS |
| | | | SVVTVPSSSLGTQTYICNVNHKPSNTKVDKRVEPKSCDKTHTCPPCP |
| | | | APELLGGPSVFLFPPKPKDTLMISRTPEVTCVVVDVSHEDPEVKFNW |
| | | | YVDGVEVHNAKTKPREEQYASTYRVVSVLTVLHQDWLNGKEYKCK |
| | | | VSNKALPAPIEKTISKAKGQPREPQVCTLPPSREEMTKNQVSLSCAVK |
| | | | GFYPSDIAVEWESNGQPENNYKTTPPVLDSDGSFFLVSKLTVDKSRW |
| | | | QQGNVFSCSVMHEALHNHYTQKSLSLSP |
| | 591 | Full Sequence | QVQLVQSGAEVKKPGSSVKVSCKASGHDFRLTYIHWVRQAPGQGLE |
| | | | WMGRVSAGSGNVKYNEKFKGRVTITADTSTSTAYMELSSLRSEDTA |
| | | | VYYCAVSYYSYDVLDYWGQGTTVTVSSASTKGPSVFPLAPSSKSTS |
| | | | GGTAALGCLVKDYFPEPVTVSWNSGALTSGVHTFPAVLQSSGLYSLS |
| | | | SVVTVPSSSLGTQTYICNVNHKPSNTKVDKRVEPKSCDKTHTCPPCP |
| | | | APELLGGPSVFLFPPKPKDTLMISRTPEVTCVVVDVSHEDPEVKFNW |
| | | | YVDGVEVHNAKTKPREEQYASTYRVVSVLTVLHQDWLNGKEYKCK |
| | | | VSNKALPAPIEKTISKAKGQPREPQVCTLPPSREEMTKNQVSLSCAVK |
| | | | GFYPSDIAVEWESNGQPENNYKTTPPVLDSDGSFFLVSKLTVDKSRW |
| | | | QQGNVFSCSVMHEALHNHYTQKSLSLSPGK |
| | 1346 | anti-TCRvβ VH | QVQLVQSGAEVKKPGSSVKVSCKASGHDFRLTYIHWVRQAPGQGLE |
| | | (CDRs | WMGRVSAGSGNVKYNEKFKGRVTITADTSTSTAYMELSSLRSEDTA |
| | | underlined) | VYYCAVSYYSYDVLDYWGQGTTVTVSS |
| | 3792 | Human IgG1 | ASTKGPSVFPLAPSSKSTSGGTAALGCLVKDYFPEPVTVSWNSGALT |
| | | hole N297A | ISGVHTFPAVLQSSGLYSLSSVVTVPSSSLGTQTYICNVNHKPSNTKVD |
| | | | KRVEPKSCDKTHTCPPCPAPELLGGPSVFLFPPKPKDTLMISRTPEVT |
| | | | CVVVDVSHEDPEVKFNWYVDGVEVHNAKTKPREEQYASTYRVVSV |
| | | | LTVLHQDWLNGKEYKCKVSNKALPAPIEKTISKAKGQPREPQVCTLP |
| | | | PSREEMTKNQVSLSCAVKGFYPSDIAVEWESNGQPENNYKTTPPVLD |
| | | | SDGSFFLVSKLTVDKSRWQQGNVFSCSVMHEALHNHYTQKSLSLSP |
| | 592 | Human IgG1 | ASTKGPSVFPLAPSSKSTSGGTAALGCLVKDYFPEPVTVSWNSGALT |
| | | hole N297A | SGVHTFPAVLQSSGLYSLSSVVTVPSSSLGTQTYICNVNHKPSNTKVD |
| | | | KRVEPKSCDKTHTCPPCPAPELLGGPSVFLFPPKPKDTLMISRTPEVT |
| | | | CVVVDVSHEDPEVKFNWYVDGVEVHNAKTKPREEQYASTYRVVSV |
| | | | LTVLHQDWLNGKEYKCKVSNKALPAPIEKTISKAKGQPREPQVCTLP |
| | | | PSREEMTKNQVSLSCAVKGFYPSDIAVEWESNGQPENNYKTTPPVLD |
| | | | SDGSFFLVSKLTVDKSRWQQGNVFSCSVMHEALHNHYTQKSLSLSP |
| | | | GK |
| Chain 2 | 3793 | Full Sequence | APTSSSTKKTQLQLEHLLLDLQMILNGINNYKNPKLTRMLTFKFYMP |
| (cytokine | | | KKATELKHLQCLEEELKPLEEVLNLAQSKNFHLRPRDLISNINVIVLE |
| containing | | | LKGSETTFMCEYADETATIVEFLNRWITFAQSIISTLTGGGGSGGGGS |
| chain) | | | DKTHTCPPCPAPELLGGPSVFLFPPKPKDTLMISRTPEVTCVVVDVSH |
| | | | EDPEVKFNWYVDGVEVHNAKTKPREEQYASTYRVVSVLTVLHQDW |
| | | | LNGKEYKCKVSNKALPAPIEKTISKAKGQPREPQVYTLPPCREEMTK |
| | | | NQVSLWCLVKGFYPSDIAVEWESNGQPENNYKTTPPVLDSDGSFFLY |
| | | | SKLTVDKSRWQQGNVFSCSVMHEALHNHYTQKSLSLSP |
| | 593 | Full Sequence | APTSSSTKKTQLQLEHLLLDLQMILNGINNYKNPKLTRMLTFKFYMP |
| | | | KKATELKHLQCLEEELKPLEEVLNLAQSKNFHLRPRDLISNINVIVLE |
| | | | LKGSETTFMCEYADETATIVEFLNRWITFAQSIISTLTGGGGSGGGGS |
| | | | DKTHTCPPCPAPELLGGPSVFLFPPKPKDTLMISRTPEVTCVVVDVSH |
| | | | EDPEVKFNWYVDGVEVHNAKTKPREEQYASTYRVVSVLTVLHQDW |
| | | | LNGKEYKCKVSNKALPAPIEKTISKAKGQPREPQVYTLPPCREEMTK |
| | | | NQVSLWCLVKGFYPSDIAVEWESNGQPENNYKTTPPVLDSDGSFFLY |
| | | | SKLTVDKSRWQQGNVFSCSVMHEALHNHYTQKSLSLSPGK |
| | 2270 | IL-2 C125A | APTSSSTKKTQLQLEHLLLDLQMILNGINNYKNPKLTRMLTFKFYMP |
| | | | KKATELKHLQCLEEELKPLEEVLNLAQSKNFHLRPRDLISNINVIVLE |
| | | | LKGSETTFMCEYADETATIVEFLNRWITFAQSIISTLT |
| | 3308 | linker | GGGGSGGGGS |
| | 3794 | Human Fc Knob | DKTHTCPPCPAPELLGGPSVFLFPPKPKDTLMISRTPEVTCVVVDVSH |
| | | cys N297A | EDPEVKFNWYVDGVEVHNAKTKPREEQYASTYRVVSVLTVLHQDW |
| | | | LNGKEYKCKVSNKALPAPIEKTISKAKGQPREPQVYTLPPCREEMTK |
| | | | NQVSLWCLVKGFYPSDIAVEWESNGQPENNYKTTPPVLDSDGSFFLY |
| | | | SKLTVDKSRWQQGNVFSCSVMHEALHNHYTQKSLSLSP |
| | 594 | Human Fc Knob | DKTHTCPPCPAPELLGGPSVFLFPPKPKDTLMISRTPEVTCVVVDVSH |
| | | cys N297A | EDPEVKFNWYVDGVEVHNAKTKPREEQYASTYRVVSVLTVLHQDW |
| | | | LNGKEYKCKVSNKALPAPIEKTISKAKGQPREPQVYTLPPCREEMTK |
| | | | NQVSLWCLVKGFYPSDIAVEWESNGQPENNYKTTPPVLDSDGSFFLY |
| | | | SKLTVDKSRWQQGNVFSCSVMHEALHNHYTQKSLSLSPGK |
| Chain 3 (light | 3518 | Full Sequence | DIQMTQSPSFLSASVGDRVTITCKASQNVADRVVWHQQKPGKAPKA |
| chain) | | | LIYSSSHRYKGVPSRFSGSGSGTEFTLTISSLQPEDFATYFCQQFKSYP |
| | | | LTFGQGTKLEIKRTVAAPSVFIFPPSDEQLKSGTASVVCLLNNFYPRE |
| | | | AKVQWKVDNALQSGNSQESVTEQDSKDSTYSLSSTLTLSKADYEKH |
| | | | KVYACEVTHQGLSSPVTKSFNRGC |
| | 1349 | anti-TCRvβ VL | DIQMTQSPSFLSASVGDRVTITCKASQNVADRVVWHQQKPGKAPKA |
| | | (CDRs | LIYSSSHRYKGVPSRFSGSGSGTEFTLTISSLQPEDFATYFCQQFKSYP |
| | | underlined) | LTFGQGTKLEIK |
| | 3644 | Immunoglobulin | RTVAAPSVFIFPPSDEQLKSGTASVVCLLNNFYPREAKVQWKVDNAL |
| | | kappa constant C | QSGNSQESVTEQDSKDSTYSLSSTLTLSKADYEKHKVYACEVTHQGL |
| | | region | SSPVTKSFNRGEC |

Exemplary Multifunctional Molecule 2

| | | | |
|---|---|---|---|
| Chain 1: heavy | 3795 | Full Sequence | QVQLVQSGAEVKKPGASVKVSCKASGFNIKSAYMHWVRQAPGQGL |
| chain | | | EWMGRIDPATGKTKYAPKFQARVTMTADTSTNTAYMELSSLRSEDT |
| | | | AVYYCARSLNWDYGLDYWGQGTLVTVSSASTKGPSVFPLAPSSKST |
| | | | SGGTAALGCLVKDYFPEPVTVSWNSGALTSGVHTFPAVLQSSGLYSL |
| | | | SSVVTVPSSSLGTQTYICNVNHKPSNTKVDKRVEPKSCDKTHTCPPCP |
| | | | APELLGGPSVFLFPPKPKDTLMISRTPEVTCVVVDVSHEDPEVKFNW |
| | | | YVDGVEVHNAKTKPREEQYASTYRVVSVLTVLHQDWLNGKEYKCK |
| | | | VSNKALPAPIEKTISKAKGQPREPQVCTLPPSREEMTKNQVSLSCAVK |
| | | | GFYPSDIAVEWESNGQPENNYKTTPPVLDSDGSFFLVSKLTVDKSRW |
| | | | QQGNVFSCSVMHEALHNHYTQKSLSLSPGK |
| | 1113 | anti-TCRvβ VH | QVQLVQSGAEVKKPGASVKVSCKASGFNIKSAYMHWVRQAPGQGL |
| | | | EWMGRIDPATGKTKYAPKFQARVTMTADTSTNTAYMELSSLRSEDT |
| | | | AVYYCARSLNWDYGLDYWGQGTLVTVSS |
| | 1102 | HC CDR1 | SAYMH |
| | | (Kabat) | |
| | 1103 | HC CDR2 | RIDPATGKTKYAPKFQA |
| | | (Kabat) | |
| | 1104 | HC CDR3 | SLNWDYGLDY |
| | | (Kabat) | |
| | 1105 | HC CDR1 | GFNIKSA |
| | | (Chothia) | |
| | 1106 | HC CDR2 | DPATGK |
| | | (Chothia) | |
| | 1104 | HC CDR3 | SLNWDYGLDY |
| | | (Chothia) | |
| | 3640 | HC CDR1 | GFNIKSAYMH |
| | | (Combined) | |
| | 1103 | HC CDR2 | RIDPATGKTKYAPKFQA |
| | | (Combined) | |
| | 1104 | HC CDR3 | SLNWDYGLDY |
| | | (Combined) | |
| | 3649 | Human IgG1 | ASTKGPSVFPLAPSSKSTSGGTAALGCLVKDYFPEPVTVSWNSGALT |
| | | hole cys N297A | SGVHTFPAVLQSSGLYSLSSVVTVPSSSLGTQTYICNVNHKPSNTKVD |
| | | | KRVEPKSCDKTHTCPPCPAPELLGGPSVFLFPPKPKDTLMISRTPEVT |
| | | | CVVVDVSHEDPEVKFNWYVDGVEVHNAKTKPREEQYASTYRVVSV |
| | | | LTVLHQDWLNQKEYKCKVSNKALPAPIEKTISKAKGQPREPQVCTLP |
| | | | PSREEMTKNQVSLSCAVKGFYPSDIAVEWESNGQPENNYKTTPPVLD |
| | | | SDGSFFLVSKLTVDKSRWQQGNVFSCSVMHEALHNHYTQKSLSLSP |
| | | | GK |
| Chain 2 | 3793 | Full Sequence | APTSSSTKKTQLQLEHLLLDLQMILNGINNYKNPKLTRMLTFKFYMP |
| (cytokine | | | KKATELKHLQCLEEELKPLEEVLNLAQSKNFHLRPRDLISNINVIVLE |
| containing | | | LKGSETTFMCEYADETATIVEFLNRWITFAQSIISTLTGGGGSGGGGS |
| chain) | | | DKTHTCPPCPAPELLGGPSVFLFPPKPKDTLMISRTPEVTCVVVDVSH |
| | | | EDPEVKFNWYVDGVEVHNAKTKPREEQYASTYRVVSVLTVLHQDW |
| | | | LNGKEYKCKVSNKALPAPIEKTISKAKGQPREPQVYTLPPCREEMTK |
| | | | NQVSLWCLVKGFYPSDIAVEWESNGQPENNYKTTPPVLDSDGSFFLY |
| | | | SKLTVDKSRWQQGNVFSCSVMHEALHNHYTQKSLSLSP |
| | 595 | Full Sequence | APTSSSTKKTQLQLEHLLLDLQMILNGINNYKNPKLTRMLTFKFYMP |
| | | | KKATELKHLQCLEEELKPLEEVLNLAQSKNFHLRPRDLISNINVIVLE |
| | | | LKGSETTFMCEYADETATIVEFLNRWITFAQSIISTLTGGGGSGGGGS |
| | | | DKTHTCPPCPAPELLGGPSVFLFPPKPKDTLMISRTPEVTCVVVDVSH |
| | | | EDPEVKFNWYVDGVEVHNAKTKPREEQYASTYRVVSVLTVLHQDW |
| | | | LNGKEYKCKVSNKALPAPIEKTISKAKGQPREPQVYTLPPCREEMTK |
| | | | NQVSLWCLVKGFYPSDIAVEWESNGQPENNYKTTPPVLDSDGSFFLY |
| | | | SKLTVDKSRWQQGNVFSCSVMHEALHNHYTQKSLSLSPGK |
| | 2270 | IL-2 C125A | APTSSSTKKTQLQLEHLLLDLQMILNGINNYKNPKLTRMLTFKFYMP |
| | | | KKATELKHLQCLEEELKPLEEVLNLAQSKNFHLRPRDLISNINVIVLE |
| | | | LKGSETTFMCEYADETATIVEFLNRWITFAQSIISTLT |
| | 3308 | linker | GGGGSGGGGS |
| | 3794 | Human Fc Knob | DKTHTCPPCPAPELLGGPSVFLFPPKPKDTLMISRTPEVTCVVVDVSH |
| | | cys N297A | EDPEVKFNWYVDGVEVHNAKTKPREEQYASTYRVVSVLTVLHQDW |
| | | | LNGKEYKCKVSNKALPAPIEKTISKAKGQPREPQVYTLPPCREEMTK |
| | | | NQVSLWCLVKGFYPSDIAVEWESNGQPENNYKTTPPVLDSDGSFFLY |
| | | | SKLTVDKSRWQQGNVFSCSVMHEALHNHYTQKSLSLSP |
| | 596 | Human Fc Knob | DKTHTCPPCPAPELLGGPSVFLFPPKPKDTLMISRTPEVTCVVVDVSH |
| | | cys N297A | EDPEVKFNWYVDGVEVHNAKTKPREEQYASTYRVVSVLTVLHQDW |
| | | | LNGKEYKCKVSNKALPAPIEKTISKAKGQPREPQVYTLPPCREEMTK |
| | | | NQVSLWCLVKGFYPSDIAVEWESNGQPENNYKTTPPVLDSDGSFFLY |
| | | | SKLTVDKSRWQQGNVFSCSVMHEALHNHYTQKSLSLSPGK |
| Chain 3 (light | 3796 | Full Sequence | EIVLTQSPGTLSLSPGERATLSCRASKSVSILGTHLIHWYQQKPGQAP |
| chain) | | | RLLIYAASNLESGIPDRFSGSGSETDFTLTISRLEPEDFAVYFCQQSIE |
| | | | DPWTFGGGTKVEIKRTVAAPSVFIFPPSDEQLKSGTASVVCLLNNFYPR |
| | | | EAKVQWKVDNALQSGNSQESVTEQDSKDSTYSLSSTLTLSKADYEK |
| | | | HKVYACEVTHQGLSSPVTKSFNRGEC |
| | 3797 | anti-TCRvβ VL | EIVLTQSPGTLSLSPGERATLSCRASKSVSILGTHLIHWYQQKPGQAP |
| | | | RLLIYAASNLESGIPDRFSGSGSETDFTLTISRLEPEDFAVYFCQQSIE |
| | | | DPWTFGGGTKVEIK |
| | 1107 | LC CDR1 | RASKSVSILGTHLIH |
| | | (Kabat) | |
| | 1108 | LC CDR2 | AASNLES |
| | | (Kabat) | |
| | 1109 | LC CDR3 | QQSIEDPWT |
| | | (Kabat) | |
| | 1110 | LC CDR1 | SKSVSILGTHL |
| | | (Chothia) | |
| | 1108 | LC CDR2 | AASNLES |
| | | (Chothia) | |
| | 1109 | LC CDR3 | QQSIEDPWT |
| | | (Chothia) | |
| | 1107 | LC CDR1 | RASKSVSILGTHLIH |
| | | (Combined) | |
| | 1108 | LC CDR2 | AASNLES |
| | | (Combined) | |
| | 1109 | LC CDR3 | QQSIEDPWT |
| | | (Combined) | |
| | 3644 | Immunoglobulin | RTVAAPSVFIFPPSDEQLKSGTASVVCLLNNFYPREAKVQWKVDNAL |
| | | kappa constant C | QSGNSQESVTEQDSKDSTYSLSSTLILSKADYEKHKVYACEVTHQGL |
| | | region | SSPVTKSFNRGEC |

Exemplary Multifunctional Molecule

| | | | |
|---|---|---|---|
| Chain 1: heavy | 3791 | Full Sequence | QVQLVQSGAEVKKPGSSVKVSCKASGHDFRLTYIHWVRQAPGQGLE |
| chain | | | WMGRVSAGSGNVKYNEKFKGRVTITADTSTSTAYMELSSLRSEDTA |
| | | | VYYCAVSYYSYDVLDYWGQGTTVTVSSASTKGPSVFPLAPSSKSTS |
| | | | GGTAALGCLVKDYFPEPVTVSWNSGALTSGVHTFPAVLQSSGLYSLS |
| | | | SVVTVPSSSLGTQTYICNVNHKPSNTKVDKRVEPKSCDKTHTCPPCP |
| | | | APELLGGPSVFLFPPKPKDTLMISRTPEVTCVVVDVSHEDPEVKFNW |
| | | | YVDGVEVHNAKTKPREEQYASTYRVVSVLTVLHQDWLNGKEYKCK |
| | | | VSNKALPAPIEKTISKAKGQPREPQVCTLPPSREEMTKNQVSLSCAVK |
| | | | GFYPSDIAVEWESNGQPENNYKTTPPVLDSDGSFFLVSKLTVDKSRW |
| | | | QQGNVFSCSVMHEALHNHYTQKSLSLSP |
| | 597 | Full Sequence | QVQLVQSGAEVKKPGSSVKVSCKASGHDFRLTYIHWVRQAPGQGLE |
| | | | WMGRVSAGSGNVKYNEKFKGRVTITADTSTSTAYMELSSLRSEDTA |
| | | | VYYCAVSYYSYDVLDYWGQGTTVTVSSASTKGPSVFPLAPSSKSTS |
| | | | GGTAALGCLVKDYFPEPVTVSWNSGALTSGVHTFPAVLQSSGLYSLS |
| | | | SVVTVPSSSLGTQTYICNVNHKPSNTKVDKRVEPKSCDKTHTCPPCP |
| | | | APELLGGPSVFLFPPKPKDTLMISRTPEVTCVVVDVSHEDPEVKFNW |
| | | | YVDGVEVHNAKTKPREEQYASTYRVVSVLTVLHQDWLNGKEYKCK |
| | | | VSNKALPAPIEKTISKAKGQPREPQVCTLPPSREEMTKNQVSLSCAVK |
| | | | GFYPSDIAVEWESNGQPENNYKTTPPVLDSDGSFFLVSKLTVDKSRW |
| | | | QQGNVFSCSVMHEALHNHYTQKSLSLSPGK |
| | 1346 | anti-TCRvβ VH | QVQLVQSGAEVKKPGSSVKVSCKASGHDFRLTYIHWVRQAPGQGLE |
| | | (CDRs | WMGRVSAGSGNVKYNEKFKGRVTITADTSTSTAYMELSSLRSEDTA |
| | | underlined) | VYYCAVSYYSYDVLDYWGQGTTVTVSS |
| | 3792 | Human IgG1 | ASTKGPSVFPLAPSSKSTSGGTAALGCLVKDYFPEPVTVSWNSGALT |
| | | hole N297A | SGVHTFPAVLQSSGLYSLSSVVTVPSSSLGTQTYICNVNHKPSNTKVD |
| | | | KRVEPKSCDKTHTCPPCPAPELLGGPSVFLFPPKPKDTLMISRTPEVT |
| | | | CVVVDVSHEDPEVKFNWYVDGVEVHNAKTKPREEQYASTYRVVSV |
| | | | LTVLHQDWLNGKEYKCKVSNKALPAPIEKTISKAKGQPREPQVCTLP |
| | | | PSREEMTKNQVSLSCAVKGFYPSDIAVEWESNGQPENNYKTTPPVLD |
| | | | SDGSFFLVSKLTVDKSRWQQGNVFSCSVMHEALHNHYTQKSLSLSP |
| | 598 | Human IgG1 | ASTKGPSVFPLAPSSKSTSGGTAALGCLVKDYFPEPVTVSWNSGALT |
| | | hole N297A | SGVHTFPAVLQSSGLYSLSSVVTVPSSSLGTQTYICNVNHKPSNTKVD |
| | | | KRVEPKSCDKTHTCPPCPAPELLGGPSVFLFPPKPKDTLMISRTPEVT |
| | | | CVVVDVSHEDPEVKFNWYVDGVEVHNAKTKPREEQYASTYRVVSV |
| | | | LTVLHQDWLNGKEYKCKVSNKALPAPIEKTISKAKGQPREPQVCTLP |
| | | | PSREEMTKNQVSLSCAVKGFYPSDIAVEWESNGQPENNYKTTPPVLD |
| | | | SDGSFFLVSKLTVDKSRWQQGNVFSCSVMHEALHNHYTQKSLSLSP |
| | | | GK |
| Chain 2 | 3798 | Full Sequence | ITCPPPMSVEHADIWVKSYSLYSRERYICNSGFKRKAGTSSLTECVLN |
| (cytokine | | | KATNVAHWTTPSLKCIRDPALVHQRPAPPSGGSGGGGSGGGSGGGG |
| containing | | | SGGGNWVNVISDLKKIEDLIQSMHIDATLYTESDVHPSCKVTAMKCF |
| chain) | | | LLELQVISLESGDASIHDTVENLIILANNSLSSNGNVTESGCKECEELE |
| | | | EKNIKEFLQSFVHIVQMFINTSGGGGSGGGGSDKTHTCPPCPAPELLG |
| | | | GPSVFLFPPKPKDTLMISRTPEVTCVVVDVSHEDPEVKFNWYVDGVE |
| | | | VHNAKTKPREEQYASTYRVVSVLTVLHQDWLNGKEYKCKVSNKAL |
| | | | PAPIEKTISKAKGQPREPQVYTLPPCREEMTKNQVSLWCLVKGFYPS |
| | | | DIAVEWESNGQPENNYKTTPPVLDSDGSFFLYSKLTVDKSRWQQGN |
| | | | VFSCSVMHEALHNHYTQKSLSLSPGK |
| | 3799 | IL-15 | ITCPPPMSVEHADIWVKSYSLYSRERYICNSGFKRKAGTSSLTECVLN |
| | | | KATNVAHWTTPSLKCIRDPALVHQRPAPPSGGSGGGGSGGGSGGGG |
| | | | SGGGNWVNVISDLKKIEDLIQSMHIDATLYTESDVHPSCKVTAMKCF |
| | | | LLELQVISLESGDASIHDTVENLIILANNSLSSNGNVTESGCKECEELE |
| | | | EKNIKEFLQSFVHIVQMFINTS |
| | 3308 | linker | GGGGSGGGGS |
| | 3648 | Human Fc Knob | DKTHTCPPCPAPELLGGPSVFLFPPKPKDTLMISRTPEVTCVVVDVSH |
| | | cys N297A | EDPEVKFNWYVDGVEVHNAKTKPREEQYASTYRVVSVLTVLHQDW |
| | | | LNGKEYKCKVSNKALPAPIEKTISKAKGQPREPQVYTLPPCREEMTK |
| | | | NQVSLWCLVKGFYPSDIAVEWESNGQPENNYKTTPPVLDSDGSFFLY |
| | | | SKLTVDKSRWQQGNVFSCSVMHEALHNHYTQKSLSLSPGK |
| Chain 3 (light | 3518 | Full Sequence | DIQMTQSPSFLSASVGDRVTITCKASQNVADRVVWHQQKPGKAPKA |
| chain) | | | LIYSSSHRYKGVPSRFSGSGSGTEFTLTISSLQPEDFATYFCQQFKSYP |
| | | | LTFGQGTKLEIKRTVAAPSVFIFPPSDEQLKSGTASVVCLLNNFYPRE |
| | | | AKVQWKVDNALQSGNSQESVTEQDSKDSTYSLSSTLTLSKADYEKH |
| | | | KVYACEVTHQGLSSPVTKSENRGEC |
| | 1349 | anti-TCRvβ VL | DIQMTQSPSFLSASVGDRVTITCKASQNVADRVVWHQQKPGKAPKA |
| | | (CDRs | LIYSSSHRYKGVPSRFSGSGSGTEFTLTISSLQPEDFATYFCQQFKSYP |
| | | underlined) | LTFGQGTKLEIK |
| | 3644 | Immunoglobulin | RTVAAPSVFIFPPSDEQLKSGTASVVCLLNNFYPREAKVQWKVDNAL |
| | | kappa constant C | QSGNSQESVTEQDSKDSTYSLSSTLTLSKADYEKHKVYACEVTHQGL |
| | | region | SSPVTKSFNRGEC |

Exemplary Multifunction Molecule 4

| | | | |
|---|---|---|---|
| Chain 1: | | | |
| Tumor | | | |
| targeting | | | |
| moiety heavy | | | |
| chain | | | |
| Chain 2: Anti- | 3800 | Full Sequence | QVQLVQSGAEVKKPGSSVKVSCKASGHDFRLTYIHWVRQAPGQGLE |
| TCRvβ 6 and | | | WMGRVSAGSGNVKYNEKFKGRVTITADTSTSTAYMELSSLRSEDTA |
| cytokine | | | VYYCAVSYYSYDVLDYWGQGTTVTVSSGGGGSGGGGSGGGGSGG |
| containing | | | GGSDIQMTQSPSFLSASVGDRVTITCKASQNVADRVVWHQQKPGKA |
| chain | | | PKALIYSSSHRYKGVPSRFSGSGSGTEFTLTISSLQPEDFATYFCQQFK |
| | | | SYPLTFGQGTKLEIKGGGGSGGGGSGGGGSAPTSSSTKKTQLQLEHL |
| | | | LLDLQMILNGINNYKNPKLTRMLTFKFYMPKKATELKHLQCLEEEL |
| | | | KPLEEVLNLAQSKNFHLRPRDLISNINVIVLELKGSETTFMCEYADET |
| | | | ATIVEFLNRWITFAQSIISTLTGGGGSGGGGSDKTHTCPPCPAPELLGG |
| | | | PSVFLFPPKPKDTLMISRTPEVTCVVVDVSHEDPEVKFNWYVDGVEV |
| | | | HNAKTKPREEQYASTYRVVSVLIVLHQDWLNGKEYKCKVSNKALP |
| | | | APIEKTISKAKGQPREPQVYTLPPCREEMTKNQVSLWCLVKGFYPSDI |
| | | | AVEWESNGQPENNYKTTPPVLDSDGSFFLYSKLTVDKSRWQQGNVF |
| | | | SCSVMHEALHNHYTQKSLSLSPGK |
| | 1346 | anti-TCRvβ VH | QVQLVQSGAEVKKPGSSVKVSCKASGHDFRLTYIHWVRQAPGQGLE |
| | | (CDRs | WMGRVSAGSGNVKYNEKFKGRVTITADTSTSTAYMELSSLRSEDTA |
| | | underlined) | VYYCAVSYYSYDVLDYWGQGTTVTVSS |
| | 3801 | linker | GGGGSGGGGSGGGGSGGGGS |
| | 1349 | anti-TCRvβ VL | DIQMTQSPSFLSASVGDRVTITCKASQNVADRVVWHQQKPGKAPKA |
| | | (CDRs | LIYSSSHRYKGVPSRFSGSGSGTEFTLTISSLQPEDFATYFCQQFKSYP |
| | | underlined) | LTFGQGTKLEIK |
| | 3309 | linker | GGGGSGGGGSGGGGS |
| | 2270 | IL-2 C125A | APTSSSTKKTQLQLEHLLLDLQMILNGINNYKNPKLTRMLTFKFYMP |
| | | | KKATELKHLQCLEEELKPLEEVLNLAQSKNFHLRPRDLISNINVIVLE |
| | | | LKGSETTFMCEYADETATIVEFLNRWITFAQSIISTLT |
| | 3308 | linker | GGGGSGGGGS |
| | 3648 | Human Fc Knob | DKTHTCPPCPAPELLGGPSVFLFPPKPKDTLMISRTPEVTCVVVDVSH |
| | | cys N297A | EDPEVKFNWYVDGVEVHNAKTKPREEQYASTYRVVSVLTVLHQDW |
| | | | LNGKEYKCKVSNKALPAPIEKTISKAKGQPREPQVYTLPPCREEMTK |
| | | | NQVSLWCLVKGFYPSDIAVEWESNGQPENNYKTTPPVLDSDGSFFLY |
| | | | SKLTVDKSRWQQGNVFSCSVMHEALHNHYTQKSLSLSPGK |
| Chain 3: | | | |
| Tumor | | | |
| targeting | | | |
| moiety light | | | |
| chain | | | |

TABLE 22
Exemplary Construct Sequences

| | | | |
|---|---|---|---|
| | | SEQ | |
| Polypeptide | | ID | |
| Chain | Component | NO: | Sequence |

BLM0155

| | | | |
|---|---|---|---|
| Polypeptide | Full | 501 | QVQLVQSGAEVKKPGSSVKVSCKASGYSFTGYTMNWVRQAPG |
| Chain 1 | Sequence | | QGLEWMGLITPYNGASSYNQKFRGRVTITVDKSTSTAYMELSSL |
| Hole | | | RSEDTAVYYCARGGYDGRGFDYWGQGTLVTVSSASTKGPSVFP |
| | | | LAPSSKSTSGGTAALGCLVKDYFPEPVTVSWNSGALTSGVHTFP |
| | | | AVLQSSGLYSLSSVVTVPSSSLGTQTYICNVNHKPSNTKVDKRV |
| | | | EPKSCDKTHTCPPCPAPELLGGPSVFLFPPKPKDTLMISRTPEVTC |
| | | | VVVDVSHEDPEVKFNWYVDGVEVHNAKTKPREEQYASTYRVV |
| | | | SVLTVLHQDWLNGKEYKCKVSNKALPAPIEKTISKAKGQPREPQ |
| | | | VCTLPPSREEMTKNQVSLSCAVKGFYPSDIAVEWESNGQPENNY |
| | | | KTTPPVLDSDGSFFLVSKLTVDKSRWQQGNVFSCSVMHEALHN |
| | | | HYTQKSLSLSPGK |
| | VH 1 | 523 | QVQLVQSGAEVKKPGSSVKVSCKASGYSFTGYTMNWVRQAPG |
| | Anti-MSLN | | QGLEWMGLITPYNGASSYNQKFRGRVTITVDKSTSTAYMELSSL |
| | | | RSEDTAVYYCARGGYDGRGFDYWGQGTLVTVSS |
| | HC CDR1 | 524 | GYSFTGYTMN |
| | HC CDR2 | 525 | LITPYNGASSYNQKFRG |
| | HC CDR3 | 526 | GGYDGRGFDY |
| | Heavy | 3649 | ASTKGPSVFPLAPSSKSTSGGTAALGCLVKDYFPEPVTVSWNSG |
| | Chain | | ALTSGVHTFPAVLQSSGLYSLSSVVTVPSSSLGTQTYICNVNHKP |
| | Constant | | SNTKVDKRVEPKSCDKTHTCPPCPAPELLGGPSVFLFPPKPKDTL |
| | Region | | MISRTPEVTCVVVDVSHEDPEVKFNWYVDGVEVHNAKTKPREE |
| | Hole | | QYASTYRVVSVLTVLHQDWLNGKEYKCKVSNKALPAPIEKTIS |
| | N297A | | KAKGQPREPQVCTLPPSREEMTKNQVSLSCAVKGFYPSDIAVEW |
| | | | ESNGQPENNYKTTPPVLDSDGSFFLVSKLTVDKSRWQQGNVFSC |
| | | | SVMHEALHNHYTQKSLSLSPGK |
| | CH1 | 549 | ASTKGPSVFPLAPSSKSTSGGTAALGCLVKDYFPEPVTVSWNSG |
| | | | ALTSGVHTFPAVLQSSGLYSLSSVVTVPSSSLGTQTYICNVNHKP |
| | | | SNTKVDKRVEPKSC |
| | Fc (CH2- | 550 | DKTHTCPPCPAPELLGGPSVFLFPPKPKDTLMISRTPEVTCVVVD |
| | CH3) region | | VSHEDPEVKFNWYVDGVEVHNAKTKPREEQYASTYRVVSVLT |
| | Hole | | VLHQDWLNGKEYKCKVSNKALPAPIEKTISKAKGQPREPQVCT |
| | | | LPPSREEMTKNQVSLSCAVKGFYPSDIAVEWESNGQPENNYKTT |
| | | | PPVLDSDGSFFLVSKLTVDKSRWQQGNVFSCSVMHEALHNHYT |
| | | | QKSLSLSPGK |
| Polypeptide | Full | 502 | EIVLTQSPATLSLSPGERATLSCSASSSVSYMHWYQQKPGLAPRR |
| Chain 3 | Sequence | | LIYDTSKLASGIPDRFSGSGSGNDYTLTISRLEPEDFAVYYCQQW |
| | | | SKHPLTFGQGTKVEIKRTVAAPSVFIFPPSDEQLKSGTASVVCLL |
| | | | NNFYPREAKVQWKVDNALQSGNSQESVTEQDSKDSTYSLSSTL |
| | | | TLSKADYEKHKVYACEVTHQGLSSPVTKSFNRGEC |
| | VL 1 | 527 | EIVLTQSPATLSLSPGERATLSCSASSSVSYMHWYQQKPGLAPRR |
| | Anti-MSLN | | LIYDTSKLASGIPDRFSGSGSQNDYTLTISRLEPEDFAVYYCQQW |
| | | | SKHPLTFGQGTKVEIK |
| | LC CDR1 | 1168 | SASSSVSYMH |
| | LC CDR2 | 1295 | DTSKLAS |
| | LC CDR3 | 528 | QQWSKHPLT |
| | Light Chain | 3644 | RTVAAPSVFIFPPSDEQLKSGTASVVCLLNNFYPREAKVQWKVD |
| | Constant | | NALQSGNSQESVTEQDSKDSTYSLSSTLTLSKADYEKHKVYACE |
| | Region | | VTHQGLSSPVTKSFNRGEC |
| | Human | | |
| | Immuno- | | |
| | globulin | | |
| | kappa | | |
| | constant C | | |
| | region | | |
| Polypeptide | Full | 3800 | QVQLVQSGAEVKKPGSSVKVSCKASGHDFRLTYIHWVRQAPGQ |
| Chain 2 | Sequence | | GLEWMGRVSAGSGNVKYNEKFKGRVTITADTSTSTAYMELSSL |
| Knob | | | RSEDTAVYYCAVSYYSYDVLDYWGQGTTVTVSSGGGGSGGGG |
| Anti-TCRvβ6 | | | SGGGGSGGGGSDIQMTQSPSFLSASVGDRVTITCKASQNVADRV |
| and | | | VWHQQKPGKAPKALIYSSSHRYKGVPSRFSGSGSGTEFTLTISSL |
| cytokine | | | QPEDFATYFCQQFKSYPLTFGQGTKLEIKGGGGSGGGGSGGGGS |
| containing | | | APTSSSTKKTQLQLEHLLLDLQMILNGINNYKNPKLTRMLTFKF |
| chain | | | YMPKKATELKHLQCLEEELKPLEEVLNLAQSKNFHLRPRDLISNI |
| | | | NVIVLELKGSETTFMCEYADETATIVEFLNRWITFAQSIISTLTGG |
| | | | GGSGGGGSDKTHTCPPCPAPELLGGPSVFLFPPKPKDTLMISRTP |
| | | | EVTCVVVDVSHEDPEVKFNWYVDGVEVHNAKTKPREEQYAST |
| | | | YRVVSVLTVLHQDWLNGKEYKCKVSNKALPAPIEKTISKAKGQ |
| | | | PREPQVYTLPPCREEMTKNQVSLWCLVKGFYPSDIAVEWESNG |
| | | | QPENNYKTTPPVLDSDGSFFLYSKLTVDKSRWQQGNVFSCSVM |
| | | | HEALHNHYTQKSLSLSPGK |
| | scFv | 1331 | QVQLVQSGAEVKKPGSSVKVSCKASGHDFRLTYIHWVRQAPGQ |
| | | | GLEWMGRVSAGSGNVKYNEKFKGRVTITADTSTSTAYMELSSL |
| | | | RSEDTAVYYCAVSYYSYDVLDYWGQGTTVTVSSGGGGSGGGG |
| | | | SGGGGSGGGGSDIQMTQSPSFLSASVGDRVTITCKASQNVADRV |
| | | | VWHQQKPGKAPKALIYSSSHRYKGVPSRFSGSGSGTEFTLTISSL |
| | | | QPEDFATYFCQQFKSYPLTFGQGTKLEIK |
| | VH 2 | 1346 | QVQLVQSGAEVKKPGSSVKVSCKASGHDFRLTYIHWVRQAPGQ |
| | | | GLEWMGRVSAGSGNVKYNEKFKGRVTITADTSTSTAYMELSSL |
| | | | RSEDTAVYYCAVSYYSYDVLDYWGQGTTVTVSS |
| | HC CDR1 | 3650 | GHDFRLTYIH |
| | HC CDR2 | 3651 | RVSAGSGNVKYNEKFKG |
| | HC CDR3 | 5 | SYYSYDVLDY |
| | Linker 1 | 3801 | GGGGSGGGGSGGGGSGGGGS |
| | VL 2 | 1349 | DIQMTQSPSFLSASVGDRVTITCKASQNVADRVVWHQQKPGKA |
| | | | PKALIYSSSHRYKGVPSRFSGSGSGTEFTLTISSLQPEDFATYFCQ |
| | | | QFKSYPLTFGQGTKLEIK |
| | LC CDR1 | 3655 | KASQNYADRVV |
| | LC CDR2 | 3653 | SSSHRYK |
| | LC CDR3 | 8 | QQFKSYPLT |
| | Linker 2 | 3309 | GGGGSGGGGSGGGGS |
| | IL-2 C125A | 2270 | APTSSSTKKTQLQLEHLLLDLQMILNGINNYKNPKLTRMLTFKF |
| | | | YMPKKATELKHLQCLEEELKPLEEVLNLAQSKNFHLRPRDLISNI |
| | | | NVIVLELKGSETTFMCEYADETATIVEFLNRWITFAQSIISTLT |
| | Linker 3 | 3308 | GGGGSGGGGS |
| | Fc (CH2- | 3648 | DKTHTCPPCPAPELLGGPSVFLFPPKPKDTLMISRTPEVTCVVVD |
| | CH3) region | | VSHEDPEVKFNWYVDGVEVHNAKTKPREEQYASTYRVVSVLT |
| | Knob | | VLHQDWLNGKEYKCKVSNKALPAPIEKTISKAKGQPREPQVYT |
| | N297A | | LPPCREEMTKNQVSLWCLVKGFYPSDIAVEWESNGQPENNYKT |
| | | | TPPVLDSDGSFFLYSKLTVDKSRWQQGNVFSCSVMHEALHNHY |
| | | | TQKSLSLSPGK |

BMM0462

| | | | |
|---|---|---|---|
| Polypeptide | Full | 590 | QVQLVQSGAEVKKPGSSVKVSCKASGYSFTGYTMNWVRQAPG |
| Chain 1 | Sequence | | QGLEWMGLITPYNGASSYNQKFRGRVTITVDKSTSTAYMELSSL |
| Hole | | | RSEDTAVYYCARGGYDGRGFDYWGQGTLVTVSSASTKGPSVFP |
| | | | LAPSSKSTSGGTAALGCLVKDYFPEPVTVSWNSGALTSGVHTFP |
| | | | AVLQSSGLYSLSSVVTVPSSSLGTQTYICNVNHKPSNTKVDKKV |
| | | | EPKSCDGGGGSGGGGSQVQLVQSGAEVKKPGSSVKVSCKASGY |
| | | | SFTGYTMNWVRQAPGQGLEWMGLITPYNGASSYNQKFRGRVTI |
| | | | TVDKSTSTAYMELSSLRSEDTAVYYCARGGYDGRGFDYWGQG |
| | | | TLVTVSSASTKGPSVFPLAPSSKSTSGGTAALGCLVKDYFPEPVT |
| | | | VSWNSGALTSGVHTFPAVLQSSGLYSLSSVVTVPSSSLGTQTYIC |
| | | | NVNHKPSNTKVDKRVEPKSCDKTHTCPPCPAPELLGGPSVFLFP |
| | | | PKPKDTLMISRTPEVTCVVVDVSHEDPEVKFNWYVDGVEVHNA |
| | | | KTKPREEQYASTYRVVSVLTVLHQDWLNGKEYKCKVSNKALP |
| | | | APIEKTISKAKGQPREPQVCTLPPSREEMTKNQVSLSCAVKGFYP |
| | | | SDIAVEWESNGQPENNYKTTPPVLDSDGSFFLVSKLTVDKSRWQ |
| | | | QGNVFSCSVMHEALHNHYTQKSLSLSPGK |
| | VH 1 | 523 | QVQLVQSGAEVKKPGSSVKVSCKASGYSFTGYTMNWVRQAPG |
| | | | QGLEWMGLITPYNGASSYNQKFRGRVTITVDKSTSTAYMELSSL |
| | | | RSEDTAVYYCARGGYDGRGFDYWGQGTLVTVSS |
| | HC CDR1 | 524 | GYSFTGYTMN |
| | HC CDR2 | 525 | LITPYNGASSYNQKFRG |
| | HC CDR3 | 526 | GGYDGRGFDY |
| | CH1 | 551 | ASTKGPSVFPLAPSSKSTSGGTAALGCLVKDYFPEPVTVSWNSG |
| | | | ALTSGVHTFPAVLQSSGLYSLSSVVTVPSSSLGTQTYICNVNHKP |
| | | | SNTKVDKKVEPKSCD |
| | Linker 1 | 3308 | GGGGSGGGGS |
| | VH 2 | 523 | QVQLVQSGAEVKKPGSSVKVSCKASGYSFTGYTMNWVRQAPG |
| | | | QGLEWMGLITPYNGASSYNQKFRGRVTITVDKSTSTAYMELSSL |
| | | | RSEDTAVYYCARGGYDGRGFDYWGQGTLVTVSS |
| | HC CDR1 | 524 | GYSFTGYTMN |
| | HC CDR2 | 525 | LITPYNGASSYNQKFRG |
| | HC CDR3 | 526 | GGYDGRGFDY |
| | Heavy | 3649 | ASTKGPSVFPLAPSSKSTSGGTAALGCLVKDYFPEPVTVSWNSG |
| | Chain | | ALTSGVHTFPAVLQSSGLYSLSSVVTVPSSSLGTQTYICNVNHKP |
| | Constant | | SNTKVDKRVEPKSCDKTHTCPPCPAPELLGGPSVFLFPPKPKDTL |
| | Region | | MISRTPEVTCVVVDVSHEDPEVKFNWYVDGVEVHNAKTKPREE |
| | Hole | | QYASTYRVVSVLTVLHQDWLNGKEYKCKVSNKALPAPIEKTIS |
| | N297A | | KAKGQPREPQVCTIPPSREEMTKNQVSLSCAVKGFYPSDIAVEW |
| | | | ESNGQPENNYKTTPPVLDSDGSFFLVSKLTVDKSRWQQGNVFSC |
| | | | SVMHEALHNHYTQKSLSLSPGK |
| | CH1 | 549 | ASTKGPSVFPLAPSSKSTSGGTAALGCLVKDYFPEPVTVSWNSG |
| | | | ALTSGVHTFPAVLQSSGLYSLSSVVTVPSSSLGTQTYICNVNHKP |
| | | | SNTKVDKRVEPKSC |
| | Fc (CH2- | 550 | DKTHTCPPCPAPELLGGPSVFLFPPKPKDTLMISRTPEVTCVVVD |
| | CH3) region | | VSHEDPEVKFNWYVDGVEVHNAKTKPREEQYASTYRVVSVLT |
| | Hole | | VLHQDWLNGKEYKCKVSNKALPAPIEKTISKAKGQPREPQVCT |
| | | | LPPSREEMTKNQVSLSCAVKGFYPSDIAVEWESNGQPENNYKTT |
| | | | PPVLDSDGSFFLVSKLTVDKSRWQQGNVFSCSVMHEALHNHYT |
| | | | QKSLSLSPGK |
| Polypeptide | Full | 502 | EIVLTQSPATLSLSPGERATLSCSASSSVSYMHWYQQKPGLAPRR |
| Chain 3 | Sequence | | LIYDTSKLASGIPDRFSGSGSGNDYTLTISRLEPEDFAVYYCQQW |
| | | | SKHPLTFGQGTKVEIKRTVAAPSVFIFPPSDEQLKSGTASVVCLL |
| | | | NNFYPREAKVQWKVDNALQSGNSQESVTEQDSKDSTYSLSSTL |
| | | | TLSKADYEKHKVYACEVTHQGLSSPVTKSFNRGEC |
| | VL 1 or 2 | 527 | EIVLTQSPATLSLSPGERATLSCSASSSVSYMHWYQQKPGLAPRR |
| | | | LIYDTSKLASGIPDRFSGSGSGNDYTLTISRLEPEDFAVYYCQQW |
| | | | SKHPLTFGQGTKVEIK |
| | LC CDR1 | 1168 | SASSSVSYMH |
| | LC CDR2 | 1295 | DTSKLAS |
| | LC CDR3 | 528 | QQWSKHPLT |
| | Light Chain | 3644 | RTVAAPSVFIFPPSDEQLKSGTASVVCLLNNFYPREAKVQWKVD |
| | Constant | | NALQSGNSQESVTEQDSKDSTYSLSSTLTLSKADYEKHKVYACE |
| | Region | | VTHQGLSSPVTKSFNRGEC |
| | Human | | |
| | Immuno- | | |
| | globulin | | |
| | kappa | | |
| | constant C | | |
| | region | | |
| Polypeptide | Full | 3800 | QVQLVQSGAEVKKPGSSVKVSCKASGHDFRLTYIHWVRQAPGQ |
| Chain 2 | Sequence | | GLEWMGRVSAGSGNVKYNEKFKGRVTITADTSTSTAYMELSSL |
| Knob | | | RSEDTAVYYCAVSYYSYDVLDYWGQGTTVTVSSGGGGSGGGG |
| | | | SGGGGSGGGGSDIQMTQSPSFLSASVGDRVTITCKASQNVADRV |
| | | | VWHQQKPGKAPKALIYSSSHRYKGVPSRFSGSGSGTEFTLTISSL |
| | | | QPEDFATYFCQQFKSYPLTFGQGTKLEIKGGGGSGGGGSGGGGS |
| | | | APTSSSTKKTQLQLEHLLLDLQMILNGINNYKNPKLTRMLTFKF |
| | | | YMPKKATELKHLQCLEEELKPLEEVLNLAQSKNFHLRPRDLISNI |
| | | | NVIVLELKGSETTFMCEYADETATIVEFLNRWITFAQSIISTLTGG |
| | | | GGSGGGGSDKTHTCPPCPAPELLGGPSVFLFPPKPKDTLMISRTP |
| | | | EVTCVVVDVSHEDPEVKFNWYVDGVEVHNAKTKPREEQYAST |
| | | | YRVVSVLTVLHQDWLNGKEYKCKVSNKALPAPIEKTISKAKGQ |
| | | | PREPQVYTLPPCREEMTKNQVSLWCLVKGFYPSDIAVEWESNG |
| | | | QPENNYKTTPPVLDSDGSFFLYSKLTVDKSRWQQGNVFSCSVM |
| | | | HEALHNHYTQKSLSLSPGK |
| | scFv | 1331 | QVQLVQSGAEVKKPGSSVKVSCKASGHDFRLTYIHWVRQAPGQ |
| | | | GLEWMGRVSAGSGNVKYNEKFKGRVTITADTSTSTAYMELSSL |
| | | | RSEDTAVYYCAVSYYSYDVLDYWGQGTTVTVSSGGGGSGGGG |
| | | | SGGGGSGGGGSDIQMTQSPSFLSASVGDRVTITCKASQNVADRV |
| | | | VWHQQKPGKAPKALIYSSSHRYKGVPSRFSGSGSGTEFTLTISSL |
| | | | QPEDFATYFCQQFKSYPLTFGQGTKLEIK |
| | VH 3 | 1346 | QVQLVQSGAEVKKPGSSVKVSCKASGHDFRLTYIHWVRQAPGQ |
| | | | GLEWMGRVSAGSGNVKYNEKFKGRVTITADTSTSTAYMELSSL |
| | | | RSEDTAVYYCAVSYYSYDVLDYWGQGTTVTVSS |
| | HC CDR1 | 3650 | GHDFRLTYIH |
| | HC CDR2 | 3651 | RVSAGSGNVKYNEKFKG |
| | HC CDR3 | 5 | SYYSYDVLDY |
| | Linker 2 | 3801 | GGGGSGGGGSGGGGSGGGGS |
| | VL 3 | 1349 | DIQMTQSPSFLSASVGDRVTITCKASQNVADRVVWHQQKPGKA |
| | | | PKALIYSSSHRYKGVPSRFSGSGSGTEFTLTISSLQPEDFATYFCQ |
| | | | QFKSYPLTFGQGTKLEIK |
| | LC CDR1 | 3655 | KASQNVADRVV |
| | LC CDR2 | 3653 | SSSHRYK |
| | LC CDR3 | 8 | QQFKSYPLT |
| | Linker 3 | 3309 | GGGGSGGGGSGGGGS |
| | IL-2 C125A | 2270 | APTSSSTKKTQLQLEHLLLDLQMILNGINNYKNPKLTRMLTFKF |
| | | | YMPKKATELKHLQCLEEELKPLEEVLNLAQSKNFHLRPRDLISNI |
| | | | NVIVLELKGSETTFMCEYADETATIVEFLNRWITFAQSIISTLT |
| | Linker 4 | 3308 | GGGGSGGGGS |
| | Fc (CH2- | 3648 | DKTHTCPPCPAPELLGGPSVFLFPPKPKDTLMISRTPEVTCVVVD |
| | CH3) region | | VSHEDPEVKFNWYVDGVEVHNAKTKPREEQYASTYRVVSVLT |
| | Knob | | VLHQDWLNGKEYKCKVSNKALPAPIEKTISKAKGQPREPQVYT |
| | N297A | | LPPCREEMTKNQVSLWCLVKGFYPSDIAVEWESNGQPENNYKT |
| | | | TPPVLDSDGSFFLYSKLTVDKSRWQQGNVFSCSVMHEALHNHY |
| | | | TQKSLSLSPGK |

BLM0158

| | | | |
|---|---|---|---|
| Polypeptide | Full | 501 | QVQLVQSGAEVKKPGSSVKVSCKASGYSFTGYTMNWVRQAPG |
| Chain 1 | Sequence | | QGLEWMGLITPYNGASSYNQKFRGRVTITVDKSTSTAYMELSSL |
| Hole | | | RSEDTAVYYCARGGYDGRGFDYWGQGTLVTVSSASTKGPSVFP |
| | | | LAPSSKSTSGGTAALGCLVKDYFPEPVTVSWNSGALTSGVHTFP |
| | | | AVLQSSGLYSLSSVVTVPSSSLGTQTYICNVNHKPSNTKVDKRV |
| | | | EPKSCDKTHTCPPCPAPELLGGPSVFLFPPKPKDTLMISRTPEVTC |
| | | | VVVDVSHEDPEVKFNWYVDGVEVHNAKTKPREEQYASTYRVV |
| | | | SVLTVLHQDWLNGKEYKCKVSNKALPAPIEKTISKAKGQPREPQ |
| | | | VCTLPPSREEMTKNQVSLSCAVKGFYPSDIAVEWESNGQPENNY |
| | | | KTTPPVLDSDGSFFLVSKLTVDKSRWQQGNVFSCSVMHEALHN |
| | | | HYTQKSLSLSPGK |
| | VH 1 | 523 | QVQLVQSGAEVKKPGSSVKVSCKASGYSFTGYTMNWVRQAPG |
| | | | QGLEWMGLITPYNGASSYNQKFRGRVTITVDKSTSTAYMELSSL |
| | | | RSEDTAVYYCARGGYDGRGFDYWGQGTLVTVSS |
| | HC CDR1 | 524 | GYSFTGYTMN |
| | HC CDR2 | 525 | LITPYNGASSYNQKFRG |
| | HC CDR3 | 526 | GGYDGRGFDY |
| | Heavy | 3649 | ASTKGPSVFPLAPSSKSTSGGTAALGCLVKDYFPEPVTVSWNSG |
| | Chain | | ALTSGVHTFPAVLQSSGLYSLSSVVTVPSSSLGTQTYICNVNHKP |
| | Constant | | SNTKVDKRVEPKSCDKTHTCPPCPAPELLGGPSVFLFPPKPKDTL |
| | Region | | MISRTPEVTCVVVDVSHEDPEVKFNWYVDGVEVHNAKTKPREE |
| | Hole | | QYASTYRVVSVLTVLHQDWLNGKEYKCKVSNKALPAPIEKTIS |
| | N297A | | KAKGQPREPQVCTLPPSREEMTKNQVSLSCAVKGFYPSDIAVEW |
| | | | ESNGQPENNYKTTPPVLDSDGSFFLVSKLTVDKSRWQQGNVFSC |
| | | | SVMHEALHNHYTQKSLSLSPGK |
| | CH1 | 549 | ASTKGPSVFPLAPSSKSTSGGTAALGCLVKDYFPEPVTVSWNSG |
| | | | ALTSGVHTFPAVLQSSGLYSLSSVVTVPSSSLGTQTYICNVNHKP |
| | | | SNTKVDKRVEPKSC |
| | Fc (CH2- | 550 | DKTHTCPPCPAPELLGGPSVFLFPPKPKDTLMISRTPEVTCVVVD |
| | CH3) region | | VSHEDPEVKFNWYVDGVEVHNAKTKPREEQYASTYRVVSVLT |
| | Hole | | VLHQDWLNGKEYKCKVSNKALPAPIEKTISKAKGQPREPQVCT |
| | | | LPPSREEMTKNQVSLSCAVKGFYPSDIAVEWESNGQPENNYKTT |
| | | | PPVLDSDGSFFLVSKLTVDKSRWQQGNVFSCSVMHEALHNHYT |
| | | | QKSLSLSPGK |
| Polypeptide | Full | 502 | EIVLTQSPATLSLSPGERATLSCSASSSVSYMHWYQQKPGLAPRR |
| Chain 3 | Sequence | | LIYDISKLASGIPDRFSGSGSGNDYTLTISRLEPEDFAVYYCQQW |
| | | | SKHPLTFGQGTKVEIKRTVAAPSVFIFPPSDEQLKSGTASVVCLL |
| | | | NNFYPREAKVQWKVDNALQSGNSQESVTEQDSKDSTYSLSSTL |
| | | | TLSKADYEKHKVYACEVTHQGLSSPVTKSFNRGEC |
| | VL 1 | 527 | EIVLTQSPATLSLSPGERATLSCSASSSVSYMHWYQQKPGLAPRR |
| | | | LIYDTSKLASGIPDRFSGSGSGNDYTLTISRLEPEDFAVYYCQQW |
| | | | SKHPLTFGQGTKVEIK |
| | LC CDR1 | 1168 | SASSSVSYMH |
| | LC CDR2 | 1295 | DTSKLAS |
| | LC CDR3 | 528 | QQWSKHPLT |
| | Light Chain | 3644 | RTVAAPSVFIFPPSDEQLKSGTASVVCLLNNFYPREAKVQWKVD |
| | Constant | | NALQSGNSQESVTEQDSKDSTYSLSSTLTLSKADYEKHKVYACE |
| | Region | | VTHQGLSSPVTKSFNRGEC |
| | Human | | |
| | Immuno- | | |
| | globulin | | |
| | kappa | | |
| | constant C | | |
| | region | | |
| Polypeptide | Full | 503 | QVQLVQSGAEVKKPGSSVKVSCKASGHDFRLTYIHWVRQAPGQ |
| Chain 2 | Sequence | | GLEWMGRVSAGSGNVKYNEKFKGRVTITADTSTSTAYMELSSL |
| Knob | | | RSEDTAVYYCAVSYYSYDVLDYWGQGTTVTVSSGGGGSGGGG |
| | | | SGGGGSGGGGSDIQMTQSPSFLSASVGDRVTITCKASQNVADRV |
| | | | VWHQQKPGKAPKALIYSSSHRYKGVPSRFSGSGSGTEFTLTISSL |
| | | | QPEDFATYFCQQFKSYPLTFGQGTKLEIKGGGGSGGGGSGGGGS |
| | | | DKTHTCPPCPAPELLGGPSVFLFPPKPKDTLMISRTPEVTCVVVD |
| | | | VSHEDPEVKFNWYVDGVEVHNAKTKPREEQYASTYRVVSVLT |
| | | | VLHQDWLNGKEYKCKVSNKALPAPIEKTISKAKGQPREPQVYT |
| | | | LPPCREEMTKNQVSLWCLVKGFYPSDIAVEWESNGQPENNYKT |
| | | | TPPVLDSDGSFFLYSKLTVDKSRWQQGNVFSCSVMHEALHNHY |
| | | | TQKSLSLSPGK |
| | scFv | 1331 | QVQLVQSGAEVKKPGSSVKVSCKASGHDFRLTYIHWVRQAPGQ |
| | | | GLEWMGRVSAGSGNVKYNEKFKGRVTITADTSTSTAYMELSSL |
| | | | RSEDTAVYYCAVSYYSYDVLDYWGQGTTVTVSSGGGGSGGGG |
| | | | SGGGGSGGGGSDIQMTQSPSFLSASVGDRVTITCKASQNVADRV |
| | | | VWHQQKPGKAPKALIYSSSHRYKGVPSRFSGSGSGTEFTLTISSL |
| | | | QPEDFATYFCQQFKSYPLTFGQGTKLEIK |
| | VH 2 | 1346 | QVQLVQSGAEVKKPGSSVKVSCKASGHDFRLTYIHWVRQAPGQ |
| | | | GLEWMGRVSAGSGNVKYNEKFKGRVTITADTSTSTAYMELSSL |
| | | | RSEDTAVYYCAVSYYSYDVLDYWGQGTTVTVSS |
| | HC CDR1 | 3650 | GHDFRLTYIH |
| | HC CDR2 | 3651 | RVSAGSGNVKYNEKFKG |
| | HC CDR3 | 5 | SYYSYDVLDY |
| | Linker 1 | 3801 | GGGGSGGGGSGGGGSGGGGS |
| | VL 2 | 1349 | DIQMTQSPSFLSASVGDRVTITCKASQNVADRVVWHQQKPGKA |
| | | | PKALIYSSSHRYKGVPSRFSGSGSGTEFTLTISSLQPEDFATYFCQ |
| | | | QFKSYPLTFGQGTKLEIK |
| | LC CDR1 | 3655 | KASQNVADRVV |
| | LC CDR2 | 3653 | SSSHRYK |
| | LC CDR3 | 8 | QQFKSYPLT |
| | Linker 2 | 3309 | GGGGSGGGGSGGGGS |
| | Fc (CH2- | 3648 | DKTHTCPPCPAPELLGGPSVFLFPPKPKDTLMISRTPEVTCVVVD |
| | CH3) region | | VSHEDPEVKFNWYVDGVEVHNAKTKPREEQYASTYRVVSVLT |
| | Knob | | VLHQDWLNGKEYKCKVSNKALPAPIEKTISKAKGQPREPQVYT |
| | N297A | | LPPCREEMTKNQVSLWCLVKGFYPSDIAVEWESNGQPENNYKT |
| | | | TPPVLDSDGSFFLYSKLTVDKSRWQQGNVFSCSVMHEALHNHY |
| | | | TQKSLSLSPGK |

BMM0274

| | | | |
|---|---|---|---|
| Polypeptide | Full | 504 | QVQLVQSGAEVKKPGSSVKVSCKASGHDFRLTYIHWVRQAPGQ |
| Chain 1 | Sequence | | GLEWMGRVSAGSGNVKYNEKFKGRVTITADTSTSTAYMELSSL |
| | | | RSEDTAVYYCAVSYYSYDVLDYWGQGTTVTVSSGGGGSGGGG |
| | | | SGGGGSGGGGSDIQMTQSPSFLSASVGDRVTITCKASQNVADRV |
| | | | VWHQQKPGKAPKALIYSSSHRYKGVPSRFSGSGSGTEFTLTISSL |
| | | | QPEDFATYFCQQFKSYPLTFGQGTKLEIKGGGGSQVQLVQSGAE |
| | | | VKKPGSSVKVSCKASGYSFTGYTMNWVRQAPGQGLEWMGLIT |
| | | | PYNGASSYNQKFRGRVTITVDKSTSTAYMELSSLRSEDTAVYYC |
| | | | ARGGYDGRGFDYWGQGTLVTVSSASTKGPSVFPLAPSSKSTSG |
| | | | GTAALGCLVKDYFPEPVTVSWNSGALTSGVHTFPAVLQSSGLYS |
| | | | LSSVVTVPSSSLGTQTYICNVNHKPSNTKVDKKVEPKSCDKTHT |
| | | | CPPCPAPELLGGPSVFLFPPKPKDTLMISRTPEVTCVVVDVSHED |
| | | | PEVKFNWYVDGVEVHNAKTKPREEQYASTYRVVSVLTVLHQD |
| | | | WLNGKEYKCKVSNKALPAPIEKTISKAKGQPREPQVYTLPPSRE |
| | | | EMTKNQVSLTCLVKGFYPSDIAVEWESNGQPENNYKTTPPVLDS |
| | | | DGSFFLYSKLTVDKSRWQQGNVFSCSVMHEALHNHYTQKSLSL |
| | | | SPGK |
| | scFv | 1331 | QVQLVQSGAEVKKPGSSVKVSCKASGHDFRLTYIHWVRQAPGQ |
| | | | GLEWMGRVSAGSGNVKYNEKFKGRVTITADTSTSTAYMELSSL |
| | | | RSEDTAVYYCAVSYYSYDVLDYWGQGTTVTVSSGGGGSGGGG |
| | | | SGGGGSGGGGSDIQMTQSPSFLSASVGDRVTITCKASQNVADRV |
| | | | VWHQQKPGKAPKALIYSSSHRYKGVPSRFSGSGSGTEFTLTISSL |
| | | | QPEDFATYFCQQFKSYPLTFGQGTKLEIK |
| | VH 1 | 1346 | QVQLVQSGAEVKKPGSSVKVSCKASGHDFRLTYIHWVRQAPGQ |
| | | | GLEWMGRVSAGSGNVKYNEKFKGRVTITADTSTSTAYMELSSL |
| | | | RSEDTAVYYCAVSYYSYDVLDYWGQGTTVTVSS |
| | HC CDR1 | 3650 | GHDFRLTYIH |
| | HC CDR2 | 3651 | RVSAGSGNVKYNEKFKG |
| | HC CDR3 | 5 | SYYSYDVLDY |
| | Linker 1 | 3801 | GGGGSGGGGSGGGGSGGGGS |
| | VL 1 | 1349 | DIQMTQSPSFLSASVGDRVTITCKASQNVADRVVWHQQKPGKA |
| | | | PKALIYSSSHRYKGVPSRFSGSGSGTEFTLTISSLQPEDFATYFCQ |
| | | | QFKSYPLTFGQGTKLEIK |
| | LC CDR1 | 3655 | KASQNVADRVV |
| | LC CDR2 | 3653 | SSSHRYK |
| | LC CDR3 | 8 | QQFKSYPLT |
| | Linker 2 | 3307 | GGGGS |
| | VH 2 | 523 | QVQLVQSGAEVKKPGSSVKVSCKASGYSFTGYTMNWVRQAPG |
| | | | QGLEWMGLITPYNGASSYNQKFRGRVTITVDKSTSTAYMELSSL |
| | | | RSEDTAVYYCARGGYDGRGFDYWGQGTLVTVSS |
| | HC CDR1 | 524 | GYSFTGYTMN |
| | HC CDR2 | 525 | LITPYNGASSYNQKFRG |
| | HC CDR3 | 526 | GGYDGRGFDY |
| | Heavy | 3645 | ASTKGPSVFPLAPSSKSTSGGTAALGCLVKDYFPEPVTVSWNSG |
| | Chain | | ALTSGVHTFPAVLQSSGLYSLSSVVTVPSSSLGTQTYICNVNHKP |
| | Constant | | SNTKVDKKVEPKSCDKTHTCPPCPAPELLGGPSVFLFPPKPKDTL |
| | Region | | MISRTPEVTCVVVDVSHEDPEVKFNWYVDGVEVHNAKTKPREE |
| | | | QYASTYRVVSVLTVLHQDWLNGKEYKCKVSNKALPAPIEKTIS |
| | | | KAKGQPREPQVYTLPPSREEMTKNQVSLTCLVKGFYPSDIAVEW |
| | | | ESNGQPENNYKTTPPVLDSDGSFFLYSKLTVDKSRWQQGNVFSC |
| | | | SVMHEALHNHYTQKSLSLSPGK |
| | CH1 | 552 | ASTKGPSVFPLAPSSKSTSGGTAALGCLVKDYFPEPVTVSWNSG |
| | | | ALTSGVHTFPAVLQSSGLYSLSSVVTVPSSSLGTQTYICNVNHKP |
| | | | SNTKVDKKVEPKSC |
| | Fc (CH2- | 553 | DKTHTCPPCPAPELLGGPSVFLFPPKPKDTLMISRTPEVTCVVVD |
| | CH3) region | | VSHEDPEVKFNWYVDGVEVHNAKTKPREEQYASTYRVVSVLT |
| | | | VLHQDWLNGKEYKCKVSNKALPAPIEKTISKAKGQPREPQVYT |
| | | | LPPSREEMTKNQVSLTCLVKGFYPSDIAVEWESNGQPENNYKTT |
| Polypeptide | Full | 502 | PPVLDSDGSFFLYSKLTVDKSRWQQGNVFSCSVMHEALHNHYT |
| Chain 3 | Sequence | | QKSLSLSPGK |
| | | | EIVLTQSPATLSLSPGERATLSCSASSSVSYMHWYQQKPGLAPRR |
| | | | LIYDTSKLASGIPDRFSGSGSGNDYTLTISRLEPEDFAVYYCQQW |
| | | | SKHPLTFGQGTKVEIKRTVAAPSVFIFPPSDEQLKSGTASVVCLL |
| | | | NNFYPREAKVQWKVDNALQSGNSQESVTEQDSKDSTYSLSSTL |
| | | | TLSKADYEKHKVYACEVTHQGLSSPVTKSFNRGEC |
| | VL 2 | 527 | EIVLTQSPATLSLSPGERATLSCSASSSVSYMHWYQQKPGLAPRR |
| | | | LIYDTSKLASGIPDRFSGSGSQNDYTLTISRLEPEDFAVYYCQQW |
| | | | SKHPLTFGQGTKVEIK |
| | LC CDR1 | 1168 | SASSSVSYMH |
| | LC CDR2 | 1295 | DTSKLAS |
| | LC CDR3 | 528 | QQWSKHPLT |
| | Light Chain | 3644 | RTVAAPSVFIFPPSDEQLKSGTASVVCLLNNFYPREAKVQWKVD |
| | Constant | | NALQSGNSQESVTEQDSKDSTYSLSSTLTLSKADYEKHKVYACE |
| | Region | | VTHQGLSSPVTKSFNRGEC |
| | Human | | |
| | Immuno- | | |
| | globulin | | |
| | kappa | | |
| | constant C | | |
| | region | | |
| Polypeptide | Full | 504 | QVQLVQSGAEVKKPGSSVKVSCKASGHDFRLTYIHWVRQAPGQ |
| Chain 2 | Sequence | | GLEWMGRVSAGSGNVKYNEKFKGRVTITADTSTSTAYMELSSL |
| | | | RSEDTAVYYCAVSYYSYDVLDYWGQGTTVTVSSGGGGSGGGG |
| | | | SGGGGSGGGGSDIQMTQSPSFLSASVGDRVTITCKASQNVADRV |
| | | | VWHQQKPGKAPKALIYSSSHRYKGVPSRFSGSGSGTEFTLTISSL |
| | | | QPEDFATYFCQQFKSYPLTFGQGTKLEIKGGGGSQVQLVQSGAE |
| | | | VKKPGSSVKVSCKASGYSFTGYTMNWVRQAPGQGLEWMGLIT |
| | | | PYNGASSYNQKFRGRVTITVDKSTSTAYMELSSLRSEDTAVYYC |
| | | | ARGGYDGRGFDYWGQGTLVTVSSASTKGPSVFPLAPSSKSTSG |
| | | | GTAALGCLVKDYFPEPVTVSWNSGALTSGVHTFPAVLQSSGLYS |
| | | | LSSVVTVPSSSLGTQTYICNVNHKPSNTKVDKKVEPKSCDKTHT |
| | | | CPPCPAPELLGGPSVFLFPPKPKDTLMISRTPEVTCVVVDVSHED |
| | | | PEVKFNWYVDGVEVHNAKTKPREEQYASTYRVVSVLTVLHQD |
| | | | WLNGKEYKCKVSNKALPAPIEKTISKAKGQPREPQVYTLPPSRE |
| | | | EMTKNQVSLTCLVKGFYPSDIAVEWESNGQPENNYKTTPPVLDS |
| | | | DGSFFLYSKLTVDKSRWQQGNVFSCSVMHEALHNHYTQKSLSL |
| | | | SPGK |
| | scFv | 1331 | QVQLVQSGAEVKKPGSSVKVSCKASGHDFRLTYIHWVRQAPGQ |
| | | | GLEWMGRVSAGSGNVKYNEKFKGRVTITADTSTSTAYMELSSL |
| | | | RSEDTAVYYCAVSYYSYDVLDYWGQGTTVTVSSGGGGSGGGG |
| | | | SGGGGSGGGGSDIQMTQSPSFLSASVGDRVTITCKASQNVADRV |
| | | | VWHQQKPGKAPKALIYSSSHRYKGVPSRFSGSGSGTEFTLTISSL |
| | | | QPEDFATYFCQQFKSYPLTFGQGTKLEIK |
| | VH 3 | 1346 | QVQLVQSGAEVKKPGSSVKVSCKASGHDFRLTYIHWVRQAPGQ |
| | | | GLEWMGRVSAGSGNVKYNEKFKGRVTITADTSTSTAYMELSSL |
| | | | RSEDTAVYYCAVSYYSYDVLDYWGQGTTVTVSS |
| | HC CDR1 | 3650 | GHDFRLTYIH |
| | HC CDR2 | 3651 | RVSAGSGNVKYNEKFKG |
| | HC CDR3 | 5 | SYYSYDVLDY |
| | Linker 3 | 3801 | GGGGSGGGGSGGGGSGGGGS |
| | VL 3 | 1349 | DIQMTQSPSFLSASVGDRVTITCKASQNVADRVVWHQQKPGKA |
| | | | PKALIYSSSHRYKGVPSRFSGSGSGTEFTLTISSLQPEDFATYFCQ |
| | | | QFKSYPLTFGQGTKLEIK |
| | LC CDR1 | 3655 | KASQNVADRVV |
| | LC CDR2 | 3653 | SSSHRYK |
| | LC CDR3 | 8 | QQFKSYPLT |
| | Linker 4 | 3307 | GGGGS |
| | VH 4 | 523 | QVQLVQSGAEVKKPGSSVKVSCKASGYSFTGYTMNWVRQAPG |
| | | | QGLEWMGLITPYNGASSYNQKFRGRVTITVDKSTSTAYMELSSL |
| | | | RSEDTAVYYCARGGYDGRGFDYWGQGTLVTVSS |
| | HC CDR1 | 524 | GYSFTGYTMN |
| | HC CDR2 | 525 | LITPYNGASSYNQKFRG |
| | HC CDR3 | 526 | GGYDGRGFDY |
| | Heavy | 3645 | ASTKGPSVFPLAPSSKSTSGGTAALGCLVKDYFPEPVTVSWNSG |
| | Chain | | ALTSGVHTFPAVLQSSGLYSLSSVVTVPSSSLGTQTYICNVNHKP |
| | Constant | | SNTKVDKKVEPKSCDKTHTCPPCPAPELLGGPSVFLFPPKPKDTL |
| | Region | | MISRTPEVTCVVVDVSHEDPEVKFNWYVDGVEVHNAKTKPREE |
| | | | QYASTYRVVSVLTVLHQDWLNGKEYKCKVSNKALPAPIEKTIS |
| | | | KAKGQPREPQVYTLPPSREEMTKNQVSLTCLVKGFYPSDIAVEW |
| | | | ESNGQPENNYKTTPPVLDSDGSFFLYSKLTVDKSRWQQGNVFSC |
| | | | SVMHEALHNHYTQKSLSLSPGK |
| | CH1 | 552 | ASTKGPSVFPLAPSSKSTSGGTAALGCLVKDYFPEPVTVSWNSG |
| | | | ALTSGVHTFPAVLQSSGLYSLSSVVTVPSSSLGTQTYICNVNHKP |
| | | | SNTKVDKKVEPKSC |
| | Fc (CH2- | 553 | DKTHTCPPCPAPELLGGPSVFLFPPKPKDTLMISRTPEVTCVVVD |
| | CH3) region | | VSHEDPEVKFNWYVDGVEVHNAKTKPREEQYASTYRVVSVLT |
| | | | VLHQDWLNGKEYKCKVSNKALPAPIEKTISKAKGQPREPQVYT |
| | | | LPPSREEMTKNQVSLTCLVKGFYPSDIAVEWESNGQPENNYKTT |
| | | | PPVLDSDGSFFLYSKLTVDKSRWQQGNVFSCSVMHEALHNHYT |
| | | | QKSLSLSPGK |
| Polypeptide | Full | 502 | EIVLTQSPATLSLSPGERATLSCSASSSVSYMHWYQQKPGLAPRR |
| Chain 4 | Sequence | | LIYDTSKLASGIPDRFSGSGSGNDYTLTISRLEPEDFAVYYCQQW |
| | | | SKHPLTFGQGTKVEIKRTVAAPSVFIFPPSDEQLKSGTASVVCLL |
| | | | NNFYPREAKVQWKVDNALQSGNSQESVTEQDSKDSTYSLSSTL |
| | | | TLSKADYEKHKVYACEVTHQGLSSPVTKSFNRGEC |
| | VL 4 | 527 | EIVLTQSPATLSLSPGERATLSCSASSSVSYMHWYQQKPGLAPRR |
| | | | LIYDTSKLASGIPDRFSGSGSGNDYTLTISRLEPEDFAVYYCQQW |
| | | | SKHPLTFGQGTKVEIK |
| | LC CDR1 | 1168 | SASSSVSYMH |
| | LC CDR2 | 1295 | DTSKLAS |
| | LC CDR3 | 528 | QQWSKHPLT |
| | Light Chain | 3644 | RTVAAPSVFIFPPSDEQLKSGTASVVCLLNNFYPREAKVQWKVD |
| | Constant | | NALQSGNSQESVTEQDSKDSTYSLSSTLTLSKADYEKHKVYACE |
| | Region | | VTHQGLSSPVTKSFNRGEC |
| | Human | | |
| | Immuno- | | |
| | globulin | | |
| | kappa | | |
| | constant C | | |
| | region | | |

BMM0388

| | | | |
|---|---|---|---|
| Polypeptide | Full | 505 | QVQLVQSGAEVKKPGSSVKVSCKASGYSFTGYTMNWVRQAPG |
| Chain 1 | Sequence | | QGLEWMGLITPYNGASSYNQKFRGRVTITVDKSTSTAYMELSSL |
| Knob | | | RSEDTAVYYCARGGYDGRGFDYWGQGTLVTVSSASTKGPSVFP |
| | | | LAPSSKSTSGGTAALGCLVKDYFPEPVTVSWNSGALTSGVHTFP |
| | | | AVLQSSGLYSLSSVVTVPSSSLGTQTYICNVNHKPSNTKVDKRV |
| | | | EPKSCDKTHTCPPCPAPELLGGPSVFLFPPKPKDTLMISRTPEVTC |
| | | | VVVDVSHEDPEVKFNWYVDGVEVHNAKTKPREEQYASTYRVV |
| | | | SVLTVLHQDWLNGKEYKCKVSNKALPAPIEKTISKAKGQPREPQ |
| | | | VYTLPPSRDELTKNQVSLTCLVKGFYPSDIAVEWESNGQPENNY |
| | | | KTTPPVLDSDGSFFLYSRLTVDKSRWQQGNVFSCSVMHEALHN |
| | | | HYTQKSLSLSPGK |
| | VH 1 | 523 | QVQLVQSGAEVKKPGSSVKVSCKASGYSFTGYTMNWVRQAPG |
| | | | QGLEWMGLITPYNGASSYNQKFRGRVTITVDKSTSTAYMELSSL |
| | | | RSEDTAVYYCARGGYDGRGFDYWGQGTLVTVSS |
| | HC CDR1 | 524 | GYSFTGYTMN |
| | HC CDR2 | 525 | LITPYNGASSYNQKFRG |
| | HC CDR3 | 526 | GGYDGRGFDY |
| | Heavy | 554 | ASTKGPSVFPLAPSSKSTSGGTAALGCLVKDYFPEPVTVSWNSG |
| | Chain | | ALTSGVHTFPAVLQSSGLYSLSSVVTVPSSSLGTQTYICNVNHKP |
| | Constant | | SNTKVDKRVEPKSCDKTHTCPPCPAPELLGGPSVFLFPPKPKDTL |
| | Region | | MISRTPEVTCVVVDVSHEDPEVKFNWYVDGVEVHNAKTKPREE |
| | Knob | | QYASTYRVVSVLTVLHQDWLNGKEYKCKVSNKALPAPIEKTIS |
| | | | KAKGQPREPQVYTLPPSRDELTKNQVSLTCLVKGFYPSDIAVEW |
| | | | ESNGQPENNYKTTPPVLDSDGSFFLYSRLTVDKSRWQQGNVFSC |
| | | | SVMHEALHNHYTQKSLSLSPGK |
| | CH1 | 549 | ASTKGPSVFPLAPSSKSTSGGTAALGCLVKDYFPEPVTVSWNSG |
| | | | ALTSGVHTFPAVLQSSGLYSLSSVVTVPSSSLGTQTYICNVNHKP |
| | | | SNTKVDKRVEPKSC |
| | Fc (CH2- | 555 | DKTHTCPPCPAPELLGGPSVFLFPPKPKDTLMISRTPEVTCVVVD |
| | CH3) region | | VSHEDPEVKFNWYVDGVEVHNAKTKPREEQYASTYRVVSVLT |
| | Knob | | VLHQDWLNGKEYKCKVSNKALPAPIEKTISKAKGQPREPQVYT |
| | | | LPPSRDELTKNQVSLTCLVKGFYPSDIAVEWESNGQPENNYKTT |
| | | | PPVLDSDGSFFLYSRLTVDKSRWQQGNVFSCSVMHEALHNHYT |
| | | | QKSLSLSPGK |
| Polypeptide | Full | 502 | EIVLTQSPATLSLSPGERATLSCSASSSVSYMHWYQQKPGLAPRR |
| Chain 3 | Sequence | | LIYDTSKLASGIPDRFSGSGSGNDYTLTISRLEPEDFAVYYCQQW |
| | | | SKHPLTFGQGTKVEIKRTVAAPSVFIFPPSDEQLKSGTASVVCLL |
| | | | NNFYPREAKVQWKVDNALQSGNSQESVTEQDSKDSTYSLSSTL |
| | | | TLSKADYEKHKVYACEVTHQGLSSPVTKSFNRGEC |
| | VL 1 | 527 | EIVLTQSPATLSLSPGERATLSCSASSSVSYMHWYQQKPGLAPRR |
| | | | LIYDTSKLASGIPDRFSGSGSGNDYTLTISRLEPEDFAVYYCQQW |
| | | | SKHPLTFGQGTKVEIK |
| | LC CDR1 | 1168 | SASSSVSYMH |
| | LC CDR2 | 1295 | DTSKLAS |
| | LC CDR3 | 528 | QQWSKHPLT |
| | Light Chain | 3644 | RTVAAPSVFIFPPSDEQLKSGTASVVCLLNNFYPREAKVQWKVD |
| | Constant | | NALQSGNSQESVTEQDSKDSTYSLSSTLTLSKADYEKHKVYACE |
| | Region | | VTHQGLSSPVTKSFNRGEC |
| | Human | | |
| | Immuno- | | |
| | globulin | | |
| | kappa | | |
| | constant C | | |
| | region | | |
| Polypeptide | Full | 506 | EVKLVESGGGLVQPGGSLRLSCAASGFTFNTYAMNWVRQAPG |
| Chain 2 | Sequence | | KGLEWVARIRSKYNNYATYYADSVKDRFTISRDDSKSSLYLQM |
| Hole | | | NNLKTEDTAMYYCVRHGNFGNSYVSWFAYWGQGTLVTVSSAS |
| | | | TKGPSVFPLAPSSKSTSGGTAALGCLVKDYFPEPVTVSWNSGAL |
| | | | TSGVHTFPAVLQSSGLYSLSSVVTVPSSSLGTQTYICNVNHKPSN |
| | | | TKVDKRVEPKSCDKTHTCPPCPAPELLGGPSVFLFPPKPKDTLMI |
| | | | SRTPEVTCVVVDVSHEDPEVKFNWYVDGVEVHNAKTKPREEQ |
| | | | YASTYRVVSVLTVLHQDWLNGKEYKCKVSNKALPAPIEKTISK |
| | | | AKGQPREPQVYTLPPSRDELTKNQVSLTCLVKGFYPSDIAVEWE |
| | | | SNGQPENNYKTTPPVLDSDGSFLLYSKLTVDKSRWQQGNVFSCS |
| | | | VMHEALHNHYTQKSLSLSPGK |
| | VH 2 | 529 | EVKLVESGGGLVQPGGSLRLSCAASGFTFNTYAMNWVRQAPG |
| | | | KGLEWVARIRSKYNNYATYYADSVKDRFTISRDDSKSSLYLQM |
| | | | NNLKTEDTAMYYCVRHGNFGNSYVSWFAYWGQGTLVTVSS |
| | HC CDR1 | 530 | GFTFNTYAMN |
| | HC CDR2 | 531 | RIRSKYNNYATYYADSVKD |
| | HC CDR3 | 532 | HGNFGNSYVSWFAY |
| | Heavy | 556 | ASTKGPSVFPLAPSSKSTSGGTAALGCLVKDYFPEPVTVSWNSG |
| | Chain | | ALTSGVHTFPAVLQSSGLYSLSSVVTVPSSSLGTQTYICNVNHKP |
| | Constant | | SNTKVDKRVEPKSCDKTHTCPPCPAPELLGGPSVFLFPPKPKDTL |
| | Region | | MISRTPEVTCVVVDVSHEDPEVKFNWYVDGVEVHNAKTKPREE |
| | Hole | | QYASTYRVVSVLTVLHQDWLNGKEYKCKVSNKALPAPIEKTIS |
| | | | KAKGQPREPQVYTLPPSRDELTKNQVSLTCLVKGFYPSDIAVEW |
| | | | ESNGQPENNYKTTPPVLDSDGSFLLYSKLTVDKSRWQQGNVFS |
| | | | CSVMHEALHNHYTQKSLSLSPGK |
| | CH1 | 549 | ASTKGPSVFPLAPSSKSTSGGTAALGCLVKDYFPEPVTVSWNSG |
| | | | ALTSGVHTFPAVLQSSGLYSLSSVVTVPSSSLGTQTYICNVNHKP |
| | | | SNTKVDKRVEPKSC |
| | Fc (CH2- | 557 | DKTHTCPPCPAPELLGGPSVFLFPPKPKDTLMISRTPEVTCVVVD |
| | CH3) region | | VSHEDPEVKFNWYVDGVEVHNAKTKPREEQYASTYRVVSVLT |
| | Hole | | VLHQDWLNGKEYKCKVSNKALPAPIEKTISKAKGQPREPQVYT |
| | | | LPPSRDELTKNQVSLTCLVKGFYPSDIAVEWESNGQPENNYKTT |
| | | | PPVLDSDGSFLLYSKLTVDKSRWQQGNVFSCSVMHEALHNHYT |
| | | | QKSLSLSPGK |
| Polypeptide | Full | 507 | QAVVTQEPSFSVSPGGTVTLTCRSSTGAVTTSNYANWVQQTPG |
| Chain 4 | Sequence | | QAFRGLIGGTNKRAPGVPARFSGSLIGDKAALTITGAQADDESIY |
| | | | FCALWYSNLWVFGGGTKLTVLGQPKANPTVTLFPPSSEELQAN |
| | | | KATLVCLISDFYPGAVTVAWKADGSPVKAGVETTKPSKQSNNK |
| | | | YAASSYLSLTPEQWKSHRSYSCQVTHEGSTVEKTVAPTECS |
| | VL 2 | 533 | QAVVTQEPSFSVSPGGTVTLTCRSSTGAVTTSNYANWVQQTPG |
| | | | QAFRGLIGGTNKRAPGVPARFSGSLIGDKAALTITGAQADDESIY |
| | | | FCALWYSNLWVFGGGTKLTVL |
| | LC CDR1 | 534 | RSSTGAVTTSNYAN |
| | LC CDR2 | 535 | GTNKRAP |
| | LC CDR3 | 536 | ALWYSNLWV |
| | Light Chain | 558 | GQPKANPTVTLFPPSSEELQANKATLVCLISDFYPGAVTVAWKA |
| | Constant | | DGSPVKAGVETTKPSKQSNNKYAASSYLSLTPEQWKSHRSYSC |
| | Region | | QVTHEGSTVEKTVAPTECS |

BMM0466

| | | | |
|---|---|---|---|
| Polypeptide | Full | 508 | QVQLVQSGAEVKKPGSSVKVSCKASGYSFTGYTMNWVRQAPG |
| Chain 1 | Sequence | | QGLEWMGLITPYNGASSYNQKFRGRVTITVDKSTSTAYMELSSL |
| Knob | | | RSEDTAVYYCARGGYDGRGFDYWGQGTLVTVSSASTKGPSVFP |
| | | | LAPSSKSTSGGTAALGCLVKDYFPEPVTVSWNSGALTSGVHTFP |
| | | | AVLQSSGLYSLSSVVTVPSSSLGTQTYICNVNHKPSNTKVDKKV |
| | | | EPKSCDGGGGSGGGGSQVQLVQSGAEVKKPGSSVKVSCKASGY |
| | | | SFTGYTMNWVRQAPGQGLEWMGLITPYNGASSYNQKFRGRVTI |
| | | | TVDKSTSTAYMELSSLRSEDTAVYYCARGGYDGRGFDYWGQG |
| | | | TLVTVSSASTKGPSVFPLAPSSKSTSGGTAALGCLVKDYFPEPVT |
| | | | VSWNSGALTSGVHTFPAVLQSSGLYSLSSVVTVPSSSLGTQTYIC |
| | | | NVNHKPSNTKVDKRVEPKSCDKTHTCPPCPAPELLGGPSVFLFP |
| | | | PKPKDTLMISRTPEVTCVVVDVSHEDPEVKFNWYVDGVEVHNA |
| | | | KTKPREEQYASTYRVVSVLTVLHQDWLNGKEYKCKVSNKALP |
| | | | APIEKTISKAKGQPREPQVYTLPPSRDELTKNQVSLTCLVKGFYP |
| | | | SDIAVEWESNGQPENNYKTTPPVLDSDGSFFLYSRLTVDKSRWQ |
| | | | QGNVFSCSVMHEALHNHYTQKSLSLSPGK |
| | VH 1 | 523 | QVQLVQSGAEVKKPGSSVKVSCKASGYSFTGYTMNWVRQAPG |
| | | | QGLEWMGLITPYNGASSYNQKFRGRVTITVDKSTSTAYMELSSL |
| | | | RSEDTAVYYCARGGYDGRGFDYWGQGTLVTVSS |
| | HC CDR1 | 524 | GYSFTGYTMN |
| | HC CDR2 | 525 | LITPYNGASSYNQKFRG |
| | HC CDR3 | 526 | GGYDGRGFDY |
| | CH1 | 551 | ASTKGPSVFPLAPSSKSTSGGTAALGCLVKDYFPEPVTVSWNSG |
| | | | ALTSGVHTFPAVLQSSGLYSLSSVVTVPSSSLGTQTYICNVNHKP |
| | | | SNTKVDKKVEPKSCD |
| | Linker | 3308 | GGGGSGGGGS |
| | VH 2 | 523 | QVQLVQSGAEVKKPGSSVKVSCKASGYSFTGYTMNWVRQAPG |
| | | | QGLEWMGLITPYNGASSYNQKFRGRVTITVDKSTSTAYMELSSL |
| | | | RSEDTAVYYCARGGYDGRGFDYWGQGTLVTVSS |
| | HC CDR1 | 524 | GYSFTGYTMN |
| | HC CDR2 | 525 | LITPYNGASSYNQKFRG |
| | HC CDR3 | 526 | GGYDGRGFDY |
| | Heavy | 554 | ASTKGPSVFPLAPSSKSTSGGTAALGCLVKDYFPEPVTVSWNSG |
| | Chain | | ALTSGVHTFPAVLQSSGLYSLSSVVTVPSSSLGTQTYICNVNHKP |
| | Constant | | SNTKVDKRVEPKSCDKTHTCPPCPAPELLGGPSVFLFPPKPKDTL |
| | Region | | MISRTPEVTCVVVDVSHEDPEVKFNWYVDGVEVHNAKTKPREE |
| | Knob | | QYASTYRVVSVLTVLHQDWLNGKEYKCKVSNKALPAPIEKTIS |
| | | | KAKGQPREPQVYTLPPSRDELTKNQVSLTCLVKGFYPSDIAVEW |
| | | | ESNGQPENNYKTTPPVLDSDGSFFLYSRLTVDKSRWQQGNVFSC |
| | | | SVMHEALHNHYTQKSLSLSPGK |
| | CH1 | 549 | ASTKGPSVFPLAPSSKSTSGGTAALGCLVKDYFPEPVTVSWNSG |
| | | | ALTSGVHTFPAVLQSSGLYSLSSVVTVPSSSLGTQTYICNVNHKP |
| | | | SNTKVDKRVEPKSC |
| | Fc (CH2- | 555 | DKTHTCPPCPAPELLGGPSVFLFPPKPKDTLMISRTPEVTCVVVD |
| | CH3) region | | VSHEDPEVKFNWYVDGVEVHNAKTKPREEQYASTYRVVSVLT |
| | Knob | | VLHQDWLNGKEYKCKVSNKALPAPIEKTISKAKGQPREPQVYT |
| | | | LPPSRDELTKNQVSLTCLVKGFYPSDIAVEWESNGQPENNYKTT |
| | | | PPVLDSDGSFFLYSRLTVDKSRWQQGNVFSCSVMHEALHNHYT |
| | | | QKSLSLSPGK |
| Polypeptide | Full | 502 | EIVLTQSPATLSLSPGERATLSCSASSSVSYMHWYQQKPGLAPRR |
| Chain 3 | Sequence | | LIYDTSKLASGIPDRFSGSGSGNDYTLTISRLEPEDFAVYYCQQW |
| | | | SKHPLTFGQGTKVEIKRTVAAPSVFIFPPSDEQLKSGTASVVCLL |
| | | | NNFYPREAKVQWKVDNALQSGNSQESVTEQDSKDSTYSLSSTL |
| | | | TLSKADYEKHKVYACEVTHQGLSSPVTKSFNRGEC |
| | VL 1 or 2 | 527 | EIVLTQSPATLSLSPGERATLSCSASSSVSYMHWYQQKPGLAPRR |
| | | | LIYDTSKLASGIPDRFSGSGSGNDYTLTISRLEPEDFAVYYCQQW |
| | | | SKHPLTFGQGTKVEIK |
| | LC CDR1 | 1168 | SASSSVSYMH |
| | LC CDR2 | 1295 | DTSKLAS |
| | LC CDR3 | 528 | QQWSKHPLT |
| | Light Chain | 3644 | RTVAAPSVFIFPPSDEQLKSGTASVVCLLNNFYPREAKVQWKVD |
| | Constant | | NALQSGNSQESVTEQDSKDSTYSLSSTLTLSKADYEKHKVYACE |
| | Region | | VTHQGLSSPVTKSFNRGEC |
| | Human | | |
| | Immuno- | | |
| | globulin | | |
| | kappa | | |
| | constant C | | |
| | region | | |
| Polypeptide | Full | 506 | EVKLVESGGGLVQPGGSLRLSCAASGFTFNTYAMNWVRQAPG |
| Chain 2 | Sequence | | KGLEWVARIRSKYNNYATYYADSVKDRFTISRDDSKSSLYLQM |
| Hole | | | NNLKTEDTAMYYCVRHGNFGNSYVSWFAYWGQGTLVTVSSAS |
| | | | TKGPSVFPLAPSSKSTSGGTAALGCLVKDYFPEPVTVSWNSGAL |
| | | | TSGVHTFPAVLQSSGLYSLSSVVTVPSSSLGTQTYICNVNHKPSN |
| | | | TKVDKRVEPKSCDKTHTCPPCPAPELLGGPSVFLFPPKPKDTLMI |
| | | | SRTPEVTCVVVDVSHEDPEVKFNWYVDGVEVHNAKTKPREEQ |
| | | | YASTYRVVSVLTVLHQDWLNGKEYKCKVSNKALPAPIEKTISK |
| | | | AKGQPREPQVYTLPPSRDELTKNQVSLTCLVKGFYPSDIAVEWE |
| | | | SNGQPENNYKTTPPVLDSDGSFLLYSKLTVDKSRWQQGNVFSCS |
| | | | VMHEALHNHYTQKSLSLSPGK |
| | VH 3 | 529 | EVKLVESGGGLVQPGGSLRLSCAASGFTFNTYAMNWVRQAPG |
| | | | KGLEWVARIRSKYNNYATYYADSVKDRFTISRDDSKSSLYLQM |
| | | | NNLKTEDTAMYYCVRHGNFGNSYVSWFAYWGQGTLVTVSS |
| | HC CDR1 | 530 | GFTFNTYAMN |
| | HC CDR2 | 531 | RIRSKYNNYATYYADSVKD |
| | HC CDR3 | 532 | HGNFGNSYVSWFAY |
| | Heavy | 556 | ASTKGPSVFPLAPSSKSTSGGTAALGCLVKDYFPEPVTVSWNSG |
| | Chain | | ALTSGVHTFPAVLQSSGLYSLSSVVTVPSSSLGTQTYICNVNHKP |
| | Constant | | SNTKVDKRVEPKSCDKTHTCPPCPAPELLGGPSVFLFPPKPKDTL |
| | Region | | MISRTPEVTCVVVDVSHEDPEVKFNWYVDGVEVHNAKTKPREE |
| | Hole | | QYASTYRVVSVLTVLHQDWLNGKEYKCKVSNKALPAPIEKTIS |
| | | | KAKGQPREPQVYTLPPSRDELTKNQVSLTCLVKGFYPSDIAVEW |
| | | | ESNGQPENNYKTTPPVLDSDGSFLLYSKLTVDKSRWQQGNVFS |
| | | | CSVMHEALHNHYTQKSLSLSPGK |
| | CH1 | 549 | ASTKGPSVFPLAPSSKSTSGGTAALGCLVKDYFPEPVTVSWNSG |
| | | | ALTSGVHTFPAVLQSSGLYSLSSVVTVPSSSLGTQTYICNVNHKP |
| | | | SNTKVDKRVEPKSC |
| | Fc (CH2- | 557 | DKTHTCPPCPAPELLGGPSVFLFPPKPKDTLMISRTPEVTCVVVD |
| | CH3) region | | VSHEDPEVKFNWYVDGVEVHNAKTKPREEQYASTYRVVSVLT |
| | Hole | | VLHQDWLNGKEYKCKVSNKALPAPIEKTISKAKGQPREPQVYT |
| | | | LPPSRDELTKNQVSLTCLVKGFYPSDIAVEWESNGQPENNYKTT |
| | | | PPVLDSDGSFLLYSKLTVDKSRWQQGNVFSCSVMHEALHNHYT |
| | | | QKSLSLSPGK |
| Polypeptide | Full | 507 | QAVVTQEPSFSVSPGGTVTLTCRSSTGAVTTSNYANWVQQTPG |
| Chain 4 | Sequence | | QAFRGLIGGTNKRAPGVPARFSGSLIGDKAALTITGAQADDESIY |
| | | | FCALWYSNLWVFGGGTKLTVLGQPKANPTVTLFPPSSEELQAN |
| | | | KATLVCLISDFYPGAVTVAWKADGSPVKAGVETTKPSKQSNNK |
| | | | YAASSYLSLTPEQWKSHRSYSCQVTHEGSTVEKTVAPTECS |
| | VL 3 | 533 | QAVVTQEPSFSVSPGGTVTLTCRSSTGAVTTSNYANWVQQTPG |
| | | | QAFRGLIGGTNKRAPGVPARFSGSLIGDKAALTITGAQADDESIY |
| | | | FCALWYSNLWVFGGGTKLTVL |
| | LC CDR1 | 534 | RSSTGAVTTSNYAN |
| | LC CDR2 | 535 | GTNKRAP |
| | LC CDR3 | 536 | ALWYSNLWV |
| | Light Chain | 558 | GQPKANPTVTLFPPSSEELQANKATLVCLISDFYPGAVTVAWKA |
| | Constant | | DGSPVKAGVETTKPSKQSNNKYAASSYLSLTPEQWKSHRSYSC |
| | Region | | QVTHEGSTVEKTVAPTECS |

BMM0449

| | | | |
|---|---|---|---|
| Polypeptide | Full | 509 | QVQLVQSGAEVKKPGASVKVSCKASGYTFTGNYINWVRQAPG |
| Chain 1 | Sequence | | QGLEWMGIINPTKGWTLYAQKFQGRVTMTRDTSISTAYMELSS |
| Hole | | | LRSEDTAVYYCARWHHGTWIFDYWGQGTLVTVSSASTKGPSVF |
| | | | PLAPSSKSTSGGTAALGCLVKDYFPEPVTVSWNSGALTSGVHTF |
| | | | PAVLQSSGLYSLSSVVTVPSSSLGTQTYICNVNHKPSNTKVDKR |
| | | | VEPKSCDKTHTCPPCPAPNAAGGPSVFIFPPKIKDVLMISLSPIVT |
| | | | CVVVDVSEDDPDVQISWFVNNVEVHTAQTQTHREDYNSTLRVV |
| | | | SALPIQHQDWMSGKEFKCKVNNKDLGAPIERTISKPKGSVRAPQ |
| | | | VCVLPPPEEEMTKKQVTLSCAVTDFMPEDIYVEWTNNGKTELN |
| | | | YKNTEPVLDSDGSYFMVSKLRVEKKNWVERNSYSCSVVHEGL |
| | | | HNHHTTKSFSRTPGK |
| | VH 1 | 537 | QVQLVQSGAEVKKPGASVKVSCKASGYTFTGNYINWVRQAPG |
| | | | QGLEWMGIINPTKGWTLYAQKFQGRVTMTRDTSISTAYMELSS |
| | | | LRSEDTAVYYCARWHHGTWIFDYWGQGTLVTVSS |
| | HC CDR1 | 538 | GYTFTGNYIN |
| | HC CDR2 | 539 | IINPTKGWTLYAQKFQG |
| | HC CDR3 | 540 | WHHGTWIFDY |
| | Heavy | 559 | ASTKGPSVFPLAPSSKSTSGGTAALGCLVKDYFPEPVTVSWNSG |
| | Chain | | ALTSGVHTFPAVLQSSGLYSLSSVVTVPSSSLGTQTYICNVNHKP |
| | Constant | | SNTKVDKRVEPKSCDKTHTCPPCPAPNAAGGPSVFIFPPKIKDVL |
| | Region | | MISLSPIVTCVVVDVSEDDPDVQISWFVNNVEVHTAQTQTHRED |
| | Hole | | YNSTLRVVSALPIQHQDWMSGKEFKCKVNNKDLGAPIERTISKP |
| | | | KGSVRAPQVCVLPPPEEEMTKKQVTLSCAVTDFMPEDIYVEWT |
| | | | NNGKTELNYKNTEPVLDSDGSYFMVSKLRVEKKNWVERNSYS |
| | | | CSVVHEGLHNHHTTKSFSRTPGK |
| | CH1 | 549 | ASTKGPSVFPLAPSSKSTSGGTAALGCLVKDYFPEPVTVSWNSG |
| | | | ALTSGVHTFPAVLQSSGLYSLSSVVTVPSSSLGTQTYICNVNHKP |
| | | | SNTKVDKRVEPKSC |
| | Fc (CH2- | 560 | DKTHTCPPCPAPNAAGGPSVFIFPPKIKDVLMISLSPIVTCVVVDV |
| | CH3) region | | SEDDPDVQISWFVNNVEVHTAQTQTHREDYNSTLRVVSALPIQH |
| | Hole | | QDWMSGKEFKCKVNNKDLGAPIERTISKPKGSVRAPQVCVLPPP |
| | | | EEEMTKKQVTLSCAVTDFMPEDIYVEWTNNGKTELNYKNTEPV |
| | | | LDSDGSYFMVSKLRVEKKNWVERNSYSCSVVHEGLHNHHTTK |
| | | | SFSRTPGK |
| Polypeptide | Full | 510 | DIVLTQPPSVSGAPGQRVTISCSGSSSNIGSNYVSWYQQLPGTAP |
| Chain 3 | Sequence | | KLLIYNDNQRPSGVPDRFSGSKSGTSASLAITGLQSEDEADYYCS |
| | | | TYDRRTFSVFGGGTKLTVLGQPKANPTVTLFPPSSEELQANKAT |
| | | | LVCLISDFYPGAVTVAWKADGSPVKAGVETTKPSKQSNNKYAA |
| | | | SSYLSLTPEQWKSHRSYSCQVTHEGSTVEKTVAPTECS |
| | VL 1 | 561 | DIVLTQPPSVSGAPGQRVTISCSGSSSNIGSNYVSWYQQLPGTAP |
| | | | KLLIYNDNQRPSGVPDRFSGSKSGTSASLAITGLQSEDEADYYCS |
| | | | TYDRRTFSVFGGGTKLTVL |
| | LC CDR1 | 562 | SGSSSNIGSNYVS |
| | LC CDR2 | 563 | NDNQRPS |
| | LC CDR3 | 564 | STYDRRTFSV |
| | Light Chain | 558 | GQPKANPTVTLFPPSSEELQANKATLVCLISDFYPGAVTVAWKA |
| | Constant | | DGSPVKAGVETTKPSKQSNNKYAASSYLSLTPEQWKSHRSYSC |
| | Region | | QVTHEGSTVEKTVAPTECS |
| Polypeptide | Full | 511 | QVQLQQSGTELMKPGASVKISCKASGYTFSNYWIEWIKQRPGH |
| Chain 2 | Sequence | | GLEWVGEILPGAGPTNYNEKFKGKATFTADSSSNTAYMQLSSLT |
| Knob | | | SEDSAVYYCARTDYDYDWFAYWGQGTLVTVSAGGGGSGGGG |
| | | | SGGGGSGGGGSDIVMSQSPSSLAVSVGEKVTMSCKSSQSLLYSG |
| | | | NQKNYLAWYQQKPGQSPKLLIYWASTRESGVPDRFTGSGSGTD |
| | | | FTLTINSVKAEDLTVYYCQQYYGYPRTFGGGTKVEIKGGGGSG |
| | | | GGGSGGGGSAPTSSSTKKTQLQLEHLLLDLQMILNGINNYKNPK |
| | | | LTRMLTFKFYMPKKATELKHLQCLEEELKPLEEVLNLAQSKNFH |
| | | | LRPRDLISNINVIVLELKGSETTFMCEYADETATIVEFLNRWITFC |
| | | | QSIISTLTGGGGSGGGGSDKTHTCPPCPAPNAAGGPSVFIFPPKIK |
| | | | DVLMISLSPIVTCVVVDVSEDDPDVQISWFVNNVEVHTAQTQTH |
| | | | REDYNSTLRVVSALPIQHQDWMSGKEFKCKVNNKDLGAPIERTI |
| | | | SKPKGSVRAPQVYVLPPCEEEMTKKQVTLWCMVTDFMPEDIYV |
| | | | EWTNNGKTELNYKNTEPVLDSDGSYFMYSKLRVEKKNWVERN |
| | | | SYSCSVVHEGLHNHHTTKSFSRTPGK |
| | scFv | 1376 | QVQLQQSGTELMKPGASVKISCKASGYTFSNYWIEWIKQRPGH |
| | | | GLEWVGEILPGAGPTNYNEKFKGKATFTADSSSNTAYMQLSSLT |
| | | | SEDSAVYYCARTDYDYDWFAYWGQGTLVTVSAGGGGSGGGG |
| | | | SGGGGSGGGGSDIVMSQSPSSLAVSVGEKVTMSCKSSQSLLYSG |
| | | | NQKNYLAWYQQKPGQSPKLLIYWASTRESGVPDRFTGSGSGTD |
| | | | FTLTINSVKAEDLTVYYCQQYYGYPRTFGGGTKVEIK |
| | VH 2 | 541 | QVQLQQSGTELMKPGASVKISCKASGYTFSNYWIEWIKQRPGH |
| | | | GLEWVGEILPGAGPTNYNEKFKGKATFTADSSSNTAYMQLSSLT |
| | | | SEDSAVYYCARTDYDYDWFAYWGQGTLVTVSA |
| | HC CDR1 | 542 | GYTFSNYWIE |
| | HC CDR2 | 543 | EILPGAGPTNYNEKFKG |
| | HC CDR3 | 544 | TDYDYDWFAY |
| | Linker 1 | 3801 | GGGGSGGGGSGGGGSGGGGS |
| | VL 2 | 3527 | DIVMSQSPSSLAVSVGEKVTMSCKSSQSLLYSGNQKNYLAWYQ |
| | | | QKPGQSPKLLIYWASTRESGVPDRFTGSGSGTDFTLTINSVKAED |
| | | | LTVYYCQQYYGYPRTFGGGTKVEIK |
| | LC CDR1 | 545 | KSSQSLLYSGNQKNYLA |
| | LC CDR2 | 546 | WASTRES |
| | LC CDR3 | 547 | QQYYGYPRT |
| | Linker 2 | 3309 | GGGGSGGGGSGGGGS |
| | IL-2 | 2191 | APTSSSTKKTQLQLEHLLLDLQMILNGINNYKNPKLTRMLTFKF |
| | | | YMPKKATELKHLQCLEEELKPLEEVLNLAQSKNFHLRPRDLISNI |
| | | | NVIVLELKGSETTFMCEYADETATIVEFLNRWITFCQSIISTLT |
| | Linker 3 | 3308 | GGGGSGGGGS |
| | Fc (CH2- | 3533 | DKTHTCPPCPAPNAAGGPSVFIFPPKIKDVLMISLSPIVTCVVVDV |
| | CH3) region | | SEDDPDVQISWFVNNVEVHTAQTQTHREDYNSTLRVVSALPIQH |
| | Knob | | QDWMSGKEFKCKVNNKDLGAPIERTISKPKGSVRAPQVYVLPP |
| | mouse Fc | | CEEEMTKKQVTLWCMVTDFMPEDIYVEWTNNGKTELNYKNTE |
| | heavy chain | | PVLDSDGSYFMYSKLRVEKKNWVERNSYSCSVVHEGLHNHHT |
| | comprising | | TKSFSRTPGK |
| | LALAPG | | |
| | mutations | | |
| | (L234A | | |
| | L235A and | | |
| | P329G) | | |

BMM0468

| | | | |
|---|---|---|---|
| Polypeptide | Full | 512 | QVQLVQSGAEVKKPGASVKVSCKASGYTFTGNYINWVRQAPG |
| Chain 1 | Sequence | | QGLEWMGIINPTKGWTLYAQKFQGRVTMTRDTSISTAYMELSS |
| Hole | | | LRSEDTAVYYCARWHHGTWIFDYWGQGTLVTVSSASTKGPSVF |
| | | | PLAPSSKSTSGGTAALGCLVKDYFPEPVTVSWNSGALTSGVHTF |
| | | | PAVLQSSGLYSLSSVVTVPSSSLGTQTYICNVNHKPSNTKVDKR |
| | | | VEPKSCDGGGGSGGGGSQVQLVQSGAEVKKPGASVKVSCKAS |
| | | | GYTFTGNYINWVRQAPGQGLEWMGIINPTKGWTLYAQKFQGR |
| | | | VTMTRDTSISTAYMELSSLRSEDTAVYYCARWHHGTWIFDYWG |
| | | | QGTLVTVSSASTKGPSVFPLAPSSKSTSGGTAALGCLVKDYFPEP |
| | | | VTVSWNSGALTSGVHTFPAVLQSSGLYSLSSVVTVPSSSLGTQT |
| | | | YICNVNHKPSNTKVDKRVEPKSCDKTHTCPPCPAPNAAGGPSVF |
| | | | IFPPKIKDVLMISLSPIVTCVVVDVSEDDPDVQISWFVNNVEVHT |
| | | | AQTQTHREDYNSTLRVVSALPIQHQDWMSGKEFKCKVNNKDL |
| | | | GAPIERTISKPKGSVRAPQVCVLPPPEEEMTKKQVTLSCAVTDF |
| | | | MPEDIYVEWTNNGKTELNYKNTEPVLDSDGSYFMVSKLRVEKK |
| | | | NWVERNSYSCSVVHEGLHNHHTTKSFSRTPGK |
| | VH 1 | 537 | QVQLVQSGAEVKKPGASVKVSCKASGYTFTGNYINWVRQAPG |
| | | | QGLEWMGIINPTKGWTLYAQKFQGRVTMTRDTSISTAYMELSS |
| | | | LRSEDTAVYYCARWHHGTWIFDYWGQGTLVTVSS |
| | HC CDR1 | 538 | GYTFTGNYIN |
| | HC CDR2 | 539 | IINPTKGWTLYAQKFQG |
| | HC CDR3 | 540 | WHHGTWIFDY |
| | CH1 | 548 | ASTKGPSVFPLAPSSKSTSGGTAALGCLVKDYFPEPVTVSWNSG |
| | | | ALTSGVHTFPAVLQSSGLYSLSSVVTVPSSSLGTQTYICNVNHKP |
| | | | SNTKVDKRVEPKSCD |
| | Linker 1 | 3308 | GGGGSGGGGS |
| | VH 2 | 537 | QVQLVQSGAEVKKPGASVKVSCKASGYTFTGNYINWVRQAPG |
| | | | QGLEWMGIINPTKGWTLYAQKFQGRVTMTRDTSISTAYMELSS |
| | | | LRSEDTAVYYCARWHHGTWIFDYWGQGTLVTVSS |
| | HC CDR1 | 538 | GYTFTGNYIN |
| | HC CDR2 | 539 | IINPTKGWTLYAQKFQG |
| | HC CDR3 | 540 | WHHGTWIFDY |
| | Heavy | 559 | ASTKGPSVFPLAPSSKSTSGGTAALGCLVKDYFPEPVTVSWNSG |
| | Chain | | ALTSGVHTFPAVLQSSGLYSLSSVVTVPSSSLGTQTYICNVNHKP |
| | Constant | | SNTKVDKRVEPKSCDKTHTCPPCPAPNAAGGPSVFIFPPKIKDVL |
| | Region | | MISLSPIVTCVVVDVSEDDPDVQISWFVNNVEVHTAQTQTHRED |
| | Hole | | YNSTLRVVSALPIQHQDWMSGKEFKCKVNNKDLGAPIERTISKP |
| | | | KGSVRAPQVCVLPPPEEEMTKKQVTLSCAVTDFMPEDIYVEWT |
| | | | NNGKTELNYKNTEPVLDSDGSYFMVSKLRVEKKNWVERNSYS |
| | | | CSVVHEGLHNHHTTKSFSRTPGK |
| | CH1 | 549 | ASTKGPSVFPLAPSSKSTSGGTAALGCLVKDYFPEPVTVSWNSG |
| | | | ALTSGVHTFPAVLQSSGLYSLSSVVTVPSSSLGTQTYICNVNHKP |
| | | | SNTKVDKRVEPKSC |
| | Fc (CH2- | 560 | DKTHTCPPCPAPNAAGGPSVFIFPPKIKDVLMISLSPIVTCVVVDV |
| | CH3) region | | SEDDPDVQISWFVNNVEVHTAQTQTHREDYNSTLRVVSALPIQH |
| | Hole | | QDWMSGKEFKCKVNNKDLGAPIERTISKPKGSVRAPQVCVLPPP |
| | | | EEEMTKKQVTLSCAVTDFMPEDIYVEWTNNGKTELNYKNTEPV |
| | | | LDSDGSYFMVSKLRVEKKNWVERNSYSCSVVHEGLHNHHTTK |
| | | | SFSRTPGK |
| Polypeptide | Full | 510 | DIVLTQPPSVSGAPGQRVTISCSGSSSNIGSNYVSWYQQLPGTAP |
| Chain 3 | Sequence | | KLLIYNDNQRPSGVPDRFSGSKSGTSASLAITGLQSEDEADYYCS |
| | | | TYDRRTFSVFGGGTKLTVLGQPKANPTVTLFPPSSEELQANKAT |
| | | | LVCLISDFYPGAVTVAWKADGSPVKAGVETTKPSKQSNNKYAA |
| | | | SSYLSLTPEQWKSHRSYSCQVTHEGSTVEKTVAPTECS |
| | VL 1 or 2 | 561 | DIVLTQPPSVSGAPGQRVTISCSGSSSNIGSNYVSWYQQLPGTAP |
| | | | KLLIYNDNQRPSGVPDRFSGSKSGTSASLAITGLQSEDEADYYCS |
| | | | TYDRRTFSVFGGGTKLTVL |
| | LC CDR1 | 562 | SGSSSNIGSNYVS |
| | LC CDR2 | 563 | NDNQRPS |
| | LC CDR3 | 564 | STYDRRTFSV |
| | Light Chain | 558 | GQPKANPTVTLFPPSSEELQANKATLVCLISDFYPGAVTVAWKA |
| | Constant | | DGSPVKAGVETTKPSKQSNNKYAASSYLSLTPEQWKSHRSYSC |
| | Region | | QVTHEGSTVEKTVAPTECS |
| Polypeptide | Full | 511 | QVQLQQSGTELMKPGASVKISCKASGYTFSNYWIEWIKQRPGH |
| Chain 2 | Sequence | | GLEWVGEILPGAGPTNYNEKFKGKATFTADSSSNTAYMQLSSLT |
| Knob | | | SEDSAVYYCARTDYDYDWFAYWGQGTLVTVSAGGGGSGGGG |
| | | | SGGGGSGGGGSDIVMSQSPSSLAVSVGEKVTMSCKSSQSLLYSG |
| | | | NQKNYLAWYQQKPGQSPKLLIYWASTRESGVPDRFTGSGSGTD |
| | | | FTLTINSVKAEDLTVYYCQQYYGYPRTFGGGTKVEIKGGGGSG |
| | | | GGGSGGGGSAPTSSSTKKTQLQLEHLLLDLQMILNGINNYKNPK |
| | | | LTRMLTFKFYMPKKATELKHLQCLEEELKPLEEVLNLAQSKNFH |
| | | | LRPRDLISNINVIVLELKGSETTFMCEYADETATIVEFLNRWITFC |
| | | | QSIISTLTGGGGSGGGGSDKTHTCPPCPAPNAAGGPSVFIFPPKIK |
| | | | DVLMISLSPIVTCVVVDVSEDDPDVQISWFVNNVEVHTAQTQTH |
| | | | REDYNSTLRVVSALPIQHQDWMSGKEFKCKVNNKDLGAPIERTI |
| | | | SKPKGSVRAPQVYVLPPCEEEMTKKQVTLWCMVTDFMPEDIYV |
| | | | EWTNNGKTELNYKNTEPVLDSDGSYFMYSKLRVEKKNWVERN |
| | | | SYSCSVVHEGLHNHHTTKSFSRTPGK |
| | scFv | 1376 | QVQLQQSGTELMKPGASVKISCKASGYTFSNYWIEWIKQRPGH |
| | | | GLEWVGEILPGAGPTNYNEKFKGKATFTADSSSNTAYMQLSSLT |
| | | | SEDSAVYYCARTDYDYDWFAYWGQGTLVTVSAGGGGSGGGG |
| | | | SGGGGSGGGGSDIVMSQSPSSLAVSVGEKVTMSCKSSQSLLYSG |
| | | | NQKNYLAWYQQKPGQSPKLLIYWASTRESGVPDRFTGSGSGTD |
| | | | FTLTINSVKAEDLTVYYCQQYYGYPRTFGGGTKVEIK |
| | VH 3 | 541 | QVQLQQSGTELMKPGASVKISCKASGYTFSNYWIEWIKQRPGH |
| | | | GLEWVGEILPGAGPTNYNEKFKGKATFTADSSSNTAYMQLSSLT |
| | | | SEDSAVYYCARTDYDYDWFAYWGQGTLVTVSA |
| | HC CDR1 | 542 | GYTFSNYWIE |
| | HC CDR2 | 543 | EILPGAGPTNYNEKFKG |
| | HC CDR3 | 544 | TDYDYDWFAY |
| | Linker 2 | 3801 | GGGGSGGGGSGGGGSGGGGS |
| | VL 3 | 3527 | DIVMSQSPSSLAVSVGEKVTMSCKSSQSLLYSGNQKNYLAWYQ |
| | | | QKPGQSPKLLIYWASTRESGVPDRFTGSGSGTDFTLTINSVKAED |
| | | | LTVYYCQQYYGYPRTFGGGTKVEIK |
| | LC CDR1 | 545 | KSSQSLLYSGNQKNYLA |
| | LC CDR2 | 546 | WASTRES |
| | LC CDR3 | 547 | QQYYGYPRT |
| | Linker 3 | 3309 | GGGGSGGGGSGGGGS |
| | IL-2 | 2191 | APTSSSTKKTQLQLEHLLLDLQMILNGINNYKNPKLTRMLTFKF |
| | | | YMPKKATELKHLQCLEEELKPLEEVLNLAQSKNFHLRPRDLISNI |
| | | | NVIVLELKGSETTFMCEYADETATIVEFLNRWITFCQSIISTLT |
| | Linker 4 | 3308 | GGGGSGGGGS |
| | Fc (CH2- | 3533 | DKTHTCPPCPAPNAAGGPSVFIFPPKIKDVLMISLSPIVTCVVVDV |
| | CH3) region | | SEDDPDVQISWFVNNVEVHTAQTQTHREDYNSTLRVVSALPIQH |
| | Knob | | QDWMSGKEFKCKVNNKDLGAPIERTISKPKGSVRAPQVYVLPP |
| | mouse Fc | | CEEEMTKKQVTLWCMVTDFMPEDIYVEWTNNGKTELNYKNTE |
| | heavy chain | | PVLDSDGSYFMYSKLRVEKKNWVERNSYSCSVVHEGLHNHHT |
| | comprising | | TKSFSRTPGK |
| | LALAPG | | |
| | mutations | | |
| | (L234A | | |
| | L235A and | | |
| | P329G) | | |

BMM0446

| | | | |
|---|---|---|---|
| Polypeptide | Full | 509 | QVQLVQSGAEVKKPGASVKVSCKASGYTFTGNYINWVRQAPG |
| Chain 1 | Sequence | | QGLEWMGIINPTKGWTLYAQKFQGRVTMTRDTSISTAYMELSS |
| Hole | | | LRSEDTAVYYCARWHHGTWIFDYWGQGTLVTVSSASTKGPSVF |
| | | | PLAPSSKSTSGGTAALGCLVKDYFPEPVTVSWNSGALTSGVHTF |
| | | | PAVLQSSGLYSLSSVVTVPSSSLGTQTYICNVNHKPSNTKVDKR |
| | | | VEPKSCDKTHTCPPCPAPNAAGGPSVFIFPPKIKDVLMISLSPIVT |
| | | | CVVVDVSEDDPDVQISWFVNNVEVHTAQTQTHREDYNSTLRVV |
| | | | SALPIQHQDWMSGKEFKCKVNNKDLGAPIERTISKPKGSVRAPQ |
| | | | VCVLPPPEEEMTKKQVTLSCAVTDFMPEDIYVEWTNNGKTELN |
| | | | YKNTEPVLDSDGSYFMVSKLRVEKKNWVERNSYSCSVVHEGL |
| | | | HNHHTTKSFSRTPGK |
| | VH 1 | 537 | QVQLVQSGAEVKKPGASVKVSCKASGYTFTGNYINWVRQAPG |
| | | | QGLEWMGIINPTKGWTLYAQKFQGRVTMTRDTSISTAYMELSS |
| | | | LRSEDTAVYYCARWHHGTWIFDYWGQGTLVTVSS |
| | HC CDR1 | 538 | GYTFTGNYIN |
| | HC CDR2 | 539 | IINPTKGWTLYAQKFQG |
| | HC CDR3 | 540 | WHHGTWIFDY |
| | Heavy | 559 | ASTKGPSVFPLAPSSKSTSGGTAALGCLVKDYFPEPVTVSWNSG |
| | Chain | | ALTSGVHTFPAVLQSSGLYSLSSVVTVPSSSLGTQTYICNVNHKP |
| | Constant | | SNTKVDKRVEPKSCDKTHTCPPCPAPNAAGGPSVFIFPPKIKDVL |
| | Region | | MISLSPIVTCVVVDVSEDDPDVQISWFVNNVEVHTAQTQTHRED |
| | Hole | | YNSTLRVVSALPIQHQDWMSGKEFKCKVNNKDLGAPIERTISKP |
| | | | KGSVRAPQVCVLPPPEEEMTKKQVTLSCAVTDFMPEDIYVEWT |
| | | | NNGKTELNYKNTEPVLDSDGSYFMVSKLRVEKKNWVERNSYS |
| | | | CSVVHEGLHNHHTTKSFSRTPGK |
| | CH1 | 549 | ASTKGPSVFPLAPSSKSTSGGTAALGCLVKDYFPEPVTVSWNSG |
| | | | ALTSGVHTFPAVLQSSGLYSLSSVVTVPSSSLGTQTYICNVNHKP |
| | | | SNTKVDKRVEPKSC |
| | Fc (CH2- | 560 | DKTHTCPPCPAPNAAGGPSVFIFPPKIKDVLMISLSPIVTCVVVDV |
| | CH3) region | | SEDDPDVQISWFVNNVEVHTAQTQTHREDYNSTLRVVSALPIQH |
| | Hole | | QDWMSGKEFKCKVNNKDLGAPIERTISKPKGSVRAPQVCVLPPP |
| | | | EEEMTKKQVTLSCAVTDFMPEDIYVEWTNNGKTELNYKNTEPV |
| | | | LDSDGSYFMVSKLRVEKKNWVERNSYSCSVVHEGLHNHHTTK |
| | | | SFSRTPGK |
| Polypeptide | Full | 510 | DIVLTQPPSVSGAPGQRVTISCSGSSSNIGSNYVSWYQQLPGTAP |
| Chain 3 | Sequence | | KLLIYNDNQRPSGVPDRFSGSKSGTSASLAITGLQSEDEADYYCS |
| | | | TYDRRTFSVFGGGTKLTVLGQPKANPTVTLFPPSSEELQANKAT |
| | | | LVCLISDFYPGAVTVAWKADGSPVKAGVETTKPSKQSNNKYAA |
| | | | SSYLSLTPEQWKSHRSYSCQVTHEGSTVEKTVAPTECS |
| | VL 1 | 561 | DIVLTQPPSVSGAPGQRVTISCSGSSSNIGSNYVSWYQQLPGTAP |
| | | | KLLIYNDNQRPSGVPDRFSGSKSGTSASLAITGLQSEDEADYYCS |
| | | | TYDRRTFSVFGGGTKLTVL |
| | LC CDR1 | 562 | SGSSSNIGSNYVS |
| | LC CDR2 | 563 | NDNQRPS |
| | LC CDR3 | 564 | STYDRRTFSV |
| | Light Chain | 558 | GQPKANPTVTLFPPSSEELQANKATLVCLISDFYPGAVTVAWKA |
| | Constant | | DGSPVKAGVETTKPSKQSNNKYAASSYLSLTPEQWKSHRSYSC |
| | Region | | QVTHEGSTVEKTVAPTECS |
| Polypeptide | Full | 513 | QVQLQQSGTELMKPGASVKISCKASGYTFSNYWIEWIKQRPGH |
| Chain 2 | Sequence | | GLEWVGEILPGAGPTNYNEKFKGKATFTADSSSNTAYMQLSSLT |
| Knob | | | SEDSAVYYCARTDYDYDWFAYWGQGTLVTVSAGGGGSGGGG |
| | | | SGGGGSGGGGSDIVMSQSPSSLAVSVGEKVTMSCKSSQSLLYSG |
| | | | NQKNYLAWYQQKPGQSPKLLIYWASTRESGVPDRFTGSGSGTD |
| | | | FTLTINSVKAEDLTVYYCQQYYGYPRTFGGGTKVEIKGGGGSD |
| | | | KTHTCPPCPAPNAAGGPSVFIFPPKIKDVLMISLSPIVTCVVVDVS |
| | | | EDDPDVQISWFVNNVEVHTAQTQTHREDYNSTLRVVSALPIQH |
| | | | QDWMSGKEFKCKVNNKDLGAPIERTISKPKGSVRAPQVYVLPP |
| | | | CEEEMTKKQVTLWCMVTDFMPEDIYVEWTNNGKTELNYKNTE |
| | | | PVLDSDGSYFMYSKLRVEKKNWVERNSYSCSVVHEGLHNHHT |
| | | | TKSFSRTPGK |
| | scFv | 1376 | QVQLQQSGTELMKPGASVKISCKASGYTFSNYWIEWIKQRPGH |
| | | | GLEWVGEILPGAGPTNYNEKFKGKATFTADSSSNTAYMQLSSLT |
| | | | SEDSAVYYCARTDYDYDWFAYWGQGTLVTVSAGGGGSGGGG |
| | | | SGGGGSGGGGSDIVMSQSPSSLAVSVGEKVTMSCKSSQSLLYSG |
| | | | NQKNYLAWYQQKPGQSPKLLIYWASTRESGVPDRFTGSGSGTD |
| | | | FTLTINSVKAEDLTVYYCQQYYGYPRTFGGGTKVEIK |
| | VH 2 | 541 | QVQLQQSGTELMKPGASVKISCKASGYTFSNYWIEWIKQRPGH |
| | | | GLEWVGEILPGAGPTNYNEKFKGKATFTADSSSNTAYMQLSSLT |
| | | | SEDSAVYYCARTDYDYDWFAYWGQGTLVTVSA |
| | HC CDR1 | 542 | GYTFSNYWIE |
| | HC CDR2 | 543 | EILPGAGPTNYNEKFKG |
| | HC CDR3 | 544 | TDYDYDWFAY |
| | Linker 1 | 3801 | GGGGSGGGGSGGGGSGGGGS |
| | VL 2 | 3527 | DIVMSQSPSSLAVSVGEKVTMSCKSSQSLLYSGNQKNYLAWYQ |
| | | | QKPGQSPKLLIYWASTRESGVPDRFTGSGSGTDFTLTINSVKAED |
| | | | LTVYYCQQYYGYPRTFGGGTKVEIK |
| | LC CDR1 | 545 | KSSQSLLYSGNQKNYLA |
| | LC CDR2 | 546 | WASTRES |
| | LC CDR3 | 547 | QQYYGYPRT |
| | Linker 2 | 3307 | GGGGS |
| | Fc (CH2- | 3533 | DKTHTCPPCPAPNAAGGPSVFIFPPKIKDVLMISLSPIVTCVVVDV |
| | CH3) region | | SEDDPDVQISWFVNNVEVHTAQTQTHREDYNSTLRVVSALPIQH |
| | Knob | | QDWMSGKEFKCKVNNKDLGAPIERTISKPKGSVRAPQVYVLPP |
| | mouse Fc | | CEEEMTKKQVTLWCMVTDFMPEDIYVEWTNNGKTELNYKNTE |
| | heavy chain | | PVLDSDGSYFMYSKLRVEKKNWVERNSYSCSVVHEGLHNHHT |
| | comprising | | TKSFSRTPGK |
| | LALAPG | | |
| | mutations | | |
| | (L234A | | |
| | L235A and | | |
| | P329G) | | |

BNM0096

| | | | |
|---|---|---|---|
| Polypeptide | Full | 512 | QVQLVQSGAEVKKPGASVKVSCKASGYTFTGNYINWVRQAPG |
| Chain 1 | Sequence | | QGLEWMGIINPTKGWTLYAQKFQGRVTMTRDTSISTAYMELSS |
| Hole | | | LRSEDTAVYYCARWHHGTWIFDYWGQGTLVTVSSASTKGPSVF |
| | | | PLAPSSKSTSGGTAALGCLVKDYFPEPVTVSWNSGALTSGVHTF |
| | | | PAVLQSSGLYSLSSVVTVPSSSLGTQTYICNVNHKPSNTKVDKR |
| | | | VEPKSCDGGGGSGGGGSQVQLVQSGAEVKKPGASVKVSCKAS |
| | | | GYTFTGNYINWVRQAPGQGLEWMGIINPTKGWTLYAQKFQGR |
| | | | VTMTRDTSISTAYMELSSLRSEDTAVYYCARWHHGTWIFDYWG |
| | | | QGTLVTVSSASTKGPSVFPLAPSSKSTSGGTAALGCLVKDYFPEP |
| | | | VTVSWNSGALTSGVHTFPAVLQSSGLYSLSSVVTVPSSSLGTQT |
| | | | YICNVNHKPSNTKVDKRVEPKSCDKTHTCPPCPAPNAAGGPSVF |
| | | | IFPPKIKDVLMISLSPIVTCVVVDVSEDDPDVQISWFVNNVEVHT |
| | | | AQTQTHREDYNSTLRVVSALPIQHQDWMSGKEFKCKVNNKDL |
| | | | GAPIERTISKPKGSVRAPQVCVLPPPEEEMTKKQVTLSCAVTDF |
| | | | MPEDIYVEWTNNGKTELNYKNTEPVLDSDGSYFMVSKLRVEKK |
| | | | NWVERNSYSCSVVHEGLHNHHTTKSFSRTPGK |
| | VH 1 | 537 | QVQLVQSGAEVKKPGASVKVSCKASGYTFTGNYINWVRQAPG |
| | | | QGLEWMGIINPTKGWTLYAQKFQGRVTMTRDTSISTAYMELSS |
| | | | LRSEDTAVYYCARWHHGTWIFDYWGQGTLVTVSS |
| | HC CDR1 | 538 | GYTFTGNYIN |
| | HC CDR2 | 539 | IINPTKGWTLYAQKFQG |
| | HC CDR3 | 540 | WHHGTWIFDY |
| | CH1 | 548 | ASTKGPSVFPLAPSSKSTSGGTAALGCLVKDYFPEPVTVSWNSG |
| | | | ALTSGVHTFPAVLQSSGLYSLSSVVTVPSSSLGTQTYICNVNHKP |
| | | | SNTKVDKRVEPKSCD |
| | Linker 1 | 3308 | GGGGSGGGGS |
| | VH 2 | 537 | QVQLVQSGAEVKKPGASVKVSCKASGYTFTGNYINWVRQAPG |
| | | | QGLEWMGIINPTKGWTLYAQKFQGRVTMTRDTSISTAYMELSS |
| | | | LRSEDTAVYYCARWHHGTWIFDYWGQGTLVTVSS |
| | HC CDR1 | 538 | GYTFTGNYIN |
| | HC CDR2 | 539 | IINPTKGWTLYAQKFQG |
| | HC CDR3 | 540 | WHHGTWIFDY |
| | Heavy | 559 | ASTKGPSVFPLAPSSKSTSGGTAALGCLVKDYFPEPVTVSWNSG |
| | Chain | | ALTSGVHTFPAVLQSSGLYSLSSVVTVPSSSLGTQTYICNVNHKP |
| | Constant | | SNTKVDKRVEPKSCDKTHTCPPCPAPNAAGGPSVFIFPPKIKDVL |
| | Region | | MISLSPIVTCVVVDVSEDDPDVQISWFVNNVEVHTAQTQTHRED |
| | Hole | | YNSTLRVVSALPIQHQDWMSGKEFKCKVNNKDLGAPIERTISKP |
| | | | KGSVRAPQVCVLPPPEEEMTKKQVTLSCAVTDFMPEDIYVEWT |
| | | | NNGKTELNYKNTEPVLDSDGSYFMVSKLRVEKKNWVERNSYS |
| | | | CSVVHEGLHNHHTTKSFSRTPGK |
| | CH1 | 549 | ASTKGPSVFPLAPSSKSTSGGTAALGCLVKDYFPEPVTVSWNSG |
| | | | ALTSGVHTFPAVLQSSGLYSLSSVVTVPSSSLGTQTYICNVNHKP |
| | | | SNTKVDKRVEPKSC |
| | Fc (CH2- | 560 | DKTHTCPPCPAPNAAGGPSVFIFPPKIKDVLMISLSPIVTCVVVDV |
| | CH3) region | | SEDDPDVQISWFVNNVEVHTAQTQTHREDYNSTLRVVSALPIQH |
| | Hole | | QDWMSGKEFKCKVNNKDLGAPIERTISKPKGSVRAPQVCVLPPP |
| | | | EEEMTKKQVTLSCAVTDFMPEDIYVEWTNNGKTELNYKNTEPV |
| | | | LDSDGSYFMVSKLRVEKKNWVERNSYSCSVVHEGLHNHHTTK |
| | | | SFSRTPGK |
| Polypeptide | Full | 510 | DIVLTQPPSVSGAPGQRVTISCSGSSSNIGSNYVSWYQQLPGTAP |
| Chain 3 | Sequence | | KLLIYNDNQRPSGVPDRFSGSKSGTSASLAITGLQSEDEADYYCS |
| | | | TYDRRTFSVFGGGTKLTVLGQPKANPTVTLFPPSSEELQANKAT |
| | | | LVCLISDFYPGAVTVAWKADGSPVKAGVETTKPSKQSNNKYAA |
| | | | SSYLSLTPEQWKSHRSYSCQVTHEGSTVEKTVAPTECS |
| | VL 1 or 2 | 561 | DIVLTQPPSVSGAPGQRVTISCSGSSSNIGSNYVSWYQQLPGTAP |
| | | | KLLIYNDNQRPSGVPDRFSGSKSGTSASLAITGLQSEDEADYYCS |
| | | | TYDRRTFSVFGGGTKLTVL |
| | LC CDR1 | 562 | SGSSSNIGSNYVS |
| | LC CDR2 | 563 | NDNQRPS |
| | LC CDR3 | 564 | STYDRRTFSV |
| | Light Chain | 558 | GQPKANPTVTLFPPSSEELQANKATLVCLISDFYPGAVTVAWKA |
| | Constant | | DGSPVKAGVETTKPSKQSNNKYAASSYLSLTPEQWKSHRSYSC |
| | Region | | QVTHEGSTVEKTVAPTECS |
| Polypeptide | Full | 513 | QVQLQQSGTELMKPGASVKISCKASGYTFSNYWIEWIKQRPGH |
| Chain 2 | Sequence | | GLEWVGEILPGAGPTNYNEKFKGKATFTADSSSNTAYMQLSSLT |
| Knob | | | SEDSAVYYCARTDYDYDWFAYWGQGTLVTVSAGGGGSGGGG |
| | | | SGGGGSGGGGSDIVMSQSPSSLAVSVGEKVTMSCKSSQSLLYSG |
| | | | NQKNYLAWYQQKPGQSPKLLIYWASTRESGVPDRFTGSGSGTD |
| | | | FTLTINSVKAEDLTVYYCQQYYGYPRTFGGGTKVEIKGGGGSD |
| | | | KTHTCPPCPAPNAAGGPSVFIFPPKIKDVLMISLSPIVTCVVVDVS |
| | | | EDDPDVQISWFVNNVEVHTAQTQTHREDYNSTLRVVSALPIQH |
| | | | QDWMSGKEFKCKVNNKDLGAPIERTISKPKGSVRAPQVYVLPP |
| | | | CEEEMTKKQVTLWCMVTDFMPEDIYVEWTNNGKTELNYKNTE |
| | | | PVLDSDGSYFMYSKLRVEKKNWVERNSYSCSVVHEGLHNHHT |
| | | | TKSFSRTPGK |
| | scFv | 1376 | QVQLQQSGTELMKPGASVKISCKASGYTFSNYWIEWIKQRPGH |
| | | | GLEWVGEILPGAGPTNYNEKFKGKATFTADSSSNTAYMQLSSLT |
| | | | SEDSAVYYCARTDYDYDWFAYWGQGTLVTVSAGGGGSGGGG |
| | | | SGGGGSGGGGSDIVMSQSPSSLAVSVGEKVTMSCKSSQSLLYSG |
| | | | NQKNYLAWYQQKPGQSPKLLIYWASTRESGVPDRFTGSGSGTD |
| | | | FTLTINSVKAEDLTVYYCQQYYGYPRTFGGGTKVEIK |
| | VH 3 | 541 | QVQLQQSGTELMKPGASVKISCKASGYTFSNYWIEWIKQRPGH |
| | | | GLEWVGEILPGAGPTNYNEKFKGKATFTADSSSNTAYMQLSSLT |
| | | | SEDSAVYYCARTDYDYDWFAYWGQGTLVTVSA |
| | HC CDR1 | 542 | GYTFSNYWIE |
| | HC CDR2 | 543 | EILPGAGPTNYNEKFKG |
| | HC CDR3 | 544 | TDYDYDWFAY |
| | Linker 2 | 3801 | GGGGSGGGGSGGGGSGGGGS |
| | VL 3 | 3527 | DIVMSQSPSSLAVSVGEKVTMSCKSSQSLLYSGNQKNYLAWYQ |
| | | | QKPGQSPKLLIYWASTRESGVPDRFTGSGSGTDFTLTINSVKAED |
| | | | LTVYYCQQYYGYPRTFGGGTKVEIK |
| | LC CDR1 | 545 | KSSQSLLYSGNQKNYLA |
| | LC CDR2 | 546 | WASTRES |
| | LC CDR3 | 547 | QQYYGYPRT |
| | Linker 3 | 3307 | GGGGS |
| | Fc (CH2- | 3533 | DKTHTCPPCPAPNAAGGPSVFIFPPKIKDVLMISLSPIVTCVVVDV |
| | CH3) region | | SEDDPDVQISWFVNNVEVHTAQTQTHREDYNSTLRVVSALPIQH |
| | Knob | | QDWMSGKEFKCKVNNKDLGAPIERTISKPKGSVRAPQVYVLPP |
| | mouse Fc | | CEEEMTKKQVTLWCMVTDFMPEDIYVEWTNNGKTELNYKNTE |
| | heavy chain | | PVLDSDGSYFMYSKLRVEKKNWVERNSYSCSVVHEGLHNHHT |
| | comprising | | TKSFSRTPGK |
| | LALAPG | | |
| | mutations | | |
| | (L234A | | |
| | L235A and | | |
| | P329G) | | |

BMM0439

| | | | |
|---|---|---|---|
| Polypeptide | Full | 514 | QVQLQQSGTELMKPGASVKISCKASGYTFSNYWIEWIKQRPGH |
| Chain 1 | Sequence | | GLEWVGEILPGAGPTNYNEKFKGKATFTADSSSNTAYMQLSSLT |
| | | | SEDSAVYYCARTDYDYDWFAYWGQGTLVTVSAGGGGSGGGG |
| | | | SGGGGSGGGGSDIVMSQSPSSLAVSVGEKVTMSCKSSQSLLYSG |
| | | | NQKNYLAWYQQKPGQSPKLLIYWASTRESGVPDRFTGSGSGTD |
| | | | FTLTINSVKAEDLTVYYCQQYYGYPRTFGGGTKVEIKGGGGSQ |
| | | | VQLVQSGAEVKKPGASVKVSCKASGYTFTGNYINWVRQAPGQ |
| | | | GLEWMGIINPTKGWTLYAQKFQGRVTMTRDTSISTAYMELSSL |
| | | | RSEDTAVYYCARWHHGTWIFDYWGQGTLVTVSSASTKGPSVFP |
| | | | LAPSSKSTSGGTAALGCLVKDYFPEPVTVSWNSGALTSGVHTFP |
| | | | AVLQSSGLYSLSSVVTVPSSSLGTQTYICNVNHKPSNTKVDKRV |
| | | | EPKSCDKTHTCPPCPAPNAAGGPSVFIFPPKIKDVLMISLSPIVTC |
| | | | VVVDVSEDDPDVQISWFVNNVEVHTAQTQTHREDYNSTLRVVS |
| | | | ALPIQHQDWMSGKEFKCKVNNKDLGAPIERTISKPKGSVRAPQV |
| | | | YVLPPPEEEMTKKQVTLTCMVTDFMPEDIYVEWTNNGKTELNY |
| | | | KNTEPVLDSDGSYFMYSKLRVEKKNWVERNSYSCSVVHEGLH |
| | | | NHHTTKSFSRTPGK |
| | scFv | 1376 | QVQLQQSGTELMKPGASVKISCKASGYTFSNYWIEWIKQRPGH |
| | | | GLEWVGEILPGAGPTNYNEKFKGKATFTADSSSNTAYMQLSSLT |
| | | | SEDSAVYYCARTDYDYDWFAYWGQGTLVTVSAGGGGSGGGG |
| | | | SGGGGSGGGGSDIVMSQSPSSLAVSVGEKVTMSCKSSQSLLYSG |
| | | | NQKNYLAWYQQKPGQSPKLLIYWASTRESGVPDRFTGSGSGTD |
| | | | FTLTINSVKAEDLTVYYCQQYYGYPRTFGGGTKVEIK |
| | VH 1 | 541 | QVQLQQSGTELMKPGASVKISCKASGYTFSNYWIEWIKQRPGH |
| | | | GLEWVGEILPGAGPTNYNEKFKGKATFTADSSSNTAYMQLSSLT |
| | | | SEDSAVYYCARTDYDYDWFAYWGQGTLVTVSA |
| | HC CDR1 | 542 | GYTFSNYWIE |
| | HC CDR2 | 543 | EILPGAGPTNYNEKFKG |
| | HC CDR3 | 544 | TDYDYDWFAY |
| | Linker 1 | 3801 | GGGGSGGGGSGGGGSGGGGS |
| | VL 1 | 3527 | DIVMSQSPSSLAVSVGEKVTMSCKSSQSLLYSGNQKNYLAWYQ |
| | | | QKPGQSPKLLIYWASTRESGVPDRFTGSGSGTDFTLTINSVKAED |
| | | | LTVYYCQQYYGYPRTFGGGTKVEIK |
| | LC CDR1 | 545 | KSSQSLLYSGNQKNYLA |
| | LC CDR2 | 546 | WASTRES |
| | LC CDR3 | 547 | QQYYGYPRT |
| | Linker 2 | 3307 | GGGGS |
| | VH 2 | 537 | QVQLVQSGAEVKKPGASVKVSCKASGYTFTGNYINWVRQAPG |
| | | | QGLEWMGIINPTKGWTLYAQKFQGRVTMTRDTSISTAYMELSS |
| | | | LRSEDTAVYYCARWHHGTWIFDYWGQGTLVTVSS |
| | HC CDR1 | 538 | GYTFTGNYIN |
| | HC CDR2 | 539 | IINPTKGWTLYAQKFQG |
| | HC CDR3 | 540 | WHHGTWIFDY |
| | Heavy | 565 | ASTKGPSVFPLAPSSKSTSGGTAALGCLVKDYFPEPVTVSWNSG |
| | Chain | | ALTSGVHTFPAVLQSSGLYSLSSVVTVPSSSLGTQTYICNVNHKP |
| | Constant | | SNTKVDKRVEPKSCDKTHTCPPCPAPNAAGGPSVFIFPPKIKDVL |
| | Region | | MISLSPIVTCVVVDVSEDDPDVQISWFVNNVEVHTAQTQTHRED |
| | | | YNSTLRVVSALPIQHQDWMSGKEFKCKVNNKDLGAPIERTISKP |
| | | | KGSVRAPQVYVLPPPEEEMTKKQVTLTCMVTDFMPEDIYVEWT |
| | | | NNGKTELNYKNTEPVLDSDGSYFMYSKLRVEKKNWVERNSYS |
| | | | CSVVHEGLHNHHTTKSFSRTPGK |
| | CH1 | 549 | ASTKGPSVFPLAPSSKSTSGGTAALGCLVKDYFPEPVTVSWNSG |
| | | | ALTSGVHTFPAVLQSSGLYSLSSVVTVPSSSLGTQTYICNVNHKP |
| | | | SNTKVDKRVEPKSC |
| | Fc (CH2- | 566 | DKTHTCPPCPAPNAAGGPSVFIFPPKIKDVLMISLSPIVTCVVVDV |
| | CH3) region | | SEDDPDVQISWFVNNVEVHTAQTQTHREDYNSTLRVVSALPIQH |
| | | | QDWMSGKEFKCKVNNKDLGAPIERTISKPKGSVRAPQVYVLPPP |
| | | | EEEMTKKQVTLTCMVTDFMPEDIYVEWTNNGKTELNYKNTEP |
| | | | VLDSDGSYFMYSKLRVEKKNWVERNSYSCSVVHEGLHNHHTT |
| | | | KSFSRTPGK |
| Polypeptide | Full | 510 | DIVLTQPPSVSGAPGQRVTISCSGSSSNIGSNYVSWYQQLPGTAP |
| Chain 3 | Sequence | | KLLIYNDNQRPSGVPDRFSGSKSGTSASLAITGLQSEDEADYYCS |
| | | | TYDRRTFSVFGGGTKLTVLGQPKANPTVTLFPPSSEELQANKAT |
| | | | LVCLISDFYPGAVTVAWKADGSPVKAGVETTKPSKQSNNKYAA |
| | | | SSYLSLTPEQWKSHRSYSCQVTHEGSTVEKTVAPTECS |
| | VL 2 | 561 | DIVLTQPPSVSGAPGQRVTISCSGSSSNIGSNYVSWYQQLPGTAP |
| | | | KLLIYNDNQRPSGVPDRFSGSKSGTSASLAITGLQSEDEADYYCS |
| | | | TYDRRTFSVFGGGTKLTVL |
| | LC CDR1 | 562 | SGSSSNIGSNYVS |
| | LC CDR2 | 563 | NDNQRPS |
| | LC CDR3 | 564 | STYDRRTFSV |
| | Light Chain | 558 | GQPKANPTVTLFPPSSEELQANKATLVCLISDFYPGAVTVAWKA |
| | Constant | | DGSPVKAGVETTKPSKQSNNKYAASSYLSLTPEQWKSHRSYSC |
| | Region | | QVTHEGSTVEKTVAPTECS |
| Polypeptide | Full | 514 | QVQLQQSGTELMKPGASVKISCKASGYTFSNYWIEWIKQRPGH |
| Chain 2 | Sequence | | GLEWVGEILPGAGPTNYNEKFKGKATFTADSSSNTAYMQLSSLT |
| | | | SEDSAVYYCARTDYDYDWFAYWGQGTLVTVSAGGGGSGGGG |
| | | | SGGGGSGGGGSDIVMSQSPSSLAVSVGEKVTMSCKSSQSLLYSG |
| | | | NQKNYLAWYQQKPGQSPKLLIYWASTRESGVPDRFTGSGSGTD |
| | | | FTLTINSVKAEDLTVYYCQQYYGYPRTFGGGTKVEIKGGGGSQ |
| | | | VQLVQSGAEVKKPGASVKVSCKASGYTFTGNYINWVRQAPGQ |
| | | | GLEWMGIINPTKGWTLYAQKFQGRVTMTRDTSISTAYMELSSL |
| | | | RSEDTAVYYCARWHHGTWIFDYWGQGTLVTVSSASTKGPSVFP |
| | | | LAPSSKSTSGGTAALGCLVKDYFPEPVTVSWNSGALTSGVHTFP |
| | | | AVLQSSGLYSLSSVVTVPSSSLGTQTYICNVNHKPSNTKVDKRV |
| | | | EPKSCDKTHTCPPCPAPNAAGGPSVFIFPPKIKDVLMISLSPIVTC |
| | | | VVVDVSEDDPDVQISWFVNNVEVHTAQTQTHREDYNSTLRVVS |
| | | | ALPIQHQDWMSGKEFKCKVNNKDLGAPIERTISKPKGSVRAPQV |
| | | | YVLPPPEEEMTKKQVTLTCMVTDFMPEDIYVEWTNNGKTELNY |
| | | | KNTEPVLDSDGSYFMYSKLRVEKKNWVERNSYSCSVVHEGLH |
| | | | NHHTTKSFSRTPGK |
| | scFv | 1376 | QVQLQQSGTELMKPGASVKISCKASGYTFSNYWIEWIKQRPGH |
| | | | GLEWVGEILPGAGPTNYNEKFKGKATFTADSSSNTAYMQLSSLT |
| | | | SEDSAVYYCARTDYDYDWFAYWGQGTLVTVSAGGGGSGGGG |
| | | | SGGGGSGGGGSDIVMSQSPSSLAVSVGEKVTMSCKSSQSLLYSG |
| | | | NQKNYLAWYQQKPGQSPKLLIYWASTRESGVPDRFTGSGSGTD |
| | | | FTLTINSVKAEDLTVYYCQQYYGYPRTFGGGTKVEIK |
| | VH 3 | 541 | QVQLQQSGTELMKPGASVKISCKASGYTFSNYWIEWIKQRPGH |
| | | | GLEWVGEILPGAGPTNYNEKFKGKATFTADSSSNTAYMQLSSLT |
| | | | SEDSAVYYCARTDYDYDWFAYWGQGTLVTVSA |
| | HC CDR1 | 542 | GYTFSNYWIE |
| | HC CDR2 | 543 | EILPGAGPTNYNEKFKG |
| | HC CDR3 | 544 | TDYDYDWFAY |
| | Linker 3 | 3801 | GGGGSGGGGSGGGGSGGGGS |
| | VL 3 | 3527 | DIVMSQSPSSLAVSVGEKVTMSCKSSQSLLYSGNQKNYLAWYQ |
| | | | QKPGQSPKLLIYWASTRESGVPDRFTGSGSGTDFTLTINSVKAED |
| | | | LTVYYCQQYYGYPRTFGGGTKVEIK |
| | LC CDR1 | 545 | KSSQSLLYSGNQKNYLA |
| | LC CDR2 | 546 | WASTRES |
| | LC CDR3 | 547 | QQYYGYPRT |
| | Linker 4 | 3307 | GGGGS |
| | VH 4 | 537 | QVQLVQSGAEVKKPGASVKVSCKASGYTFTGNYINWVRQAPG |
| | | | QGLEWMGIINPTKGWTLYAQKFQGRVTMTRDTSISTAYMELSS |
| | | | LRSEDTAVYYCARWHHGTWIFDYWGQGTLVTVSS |
| | HC CDR1 | 538 | GYTFTGNYIN |
| | HC CDR2 | 539 | IINPTKGWTLYAQKFQG |
| | HC CDR3 | 540 | WHHGTWIFDY |
| | Heavy | 565 | ASTKGPSVFPLAPSSKSTSGGTAALGCLVKDYFPEPVTVSWNSG |
| | Chain | | ALTSGVHTFPAVLQSSGLYSLSSVVTVPSSSLGTQTYICNVNHKP |
| | Constant | | SNTKVDKRVEPKSCDKTHTCPPCPAPNAAGQPSVFIFPPKIKDVL |
| | Region | | MISLSPIVTCVVVDVSEDDPDVQISWFVNNVEVHTAQTQTHRED |
| | | | YNSTLRVVSALPIQHQDWMSGKEFKCKVNNKDLGAPIERTISKP |
| | | | KGSVRAPQVYVLPPPEEEMTKKQVTLTCMVTDFMPEDIYVEWT |
| | | | NNGKTELNYKNTEPVLDSDGSYFMYSKLRVEKKNWVERNSYS |
| | | | CSVVHEGLHNHHTTKSFSRTPGK |
| | CH1 | 549 | ASTKGPSVFPLAPSSKSTSGGTAALGCLVKDYFPEPVTVSWNSG |
| | | | ALTSGVHTFPAVLQSSGLYSLSSVVTVPSSSLGTQTYICNVNHKP |
| | | | SNTKVDKRVEPKSC |
| | Fc (CH2- | 566 | DKTHTCPPCPAPNAAGGPSVFIFPPKIKDVLMISLSPIVTCVVVDV |
| | CH3) region | | SEDDPDVQISWFVNNVEVHTAQTQTHREDYNSTLRVVSALPIQH |
| | | | QDWMSGKEFKCKVNNKDLGAPIERTISKPKGSVRAPQVYVLPPP |
| | | | EEEMTKKQVTLTCMVTDFMPEDIYVEWTNNGKTELNYKNTEP |
| | | | VLDSDGSYFMYSKLRVEKKNWVERNSYSCSVVHEGLHNHHTT |
| | | | KSFSRTPGK |
| Polypeptide | Full | 510 | DIVLTQPPSVSGAPGQRVTISCSGSSSNIGSNYVSWYQQLPGTAP |
| Chain 4 | Sequence | | KLLIYNDNQRPSGVPDRFSGSKSGTSASLAITGLQSEDEADYYCS |
| | | | TYDRRTFSVFGGGTKLTVLGQPKANPTVTLFPPSSEELQANKAT |
| | | | LVCLISDFYPGAVTVAWKADGSPVKAGVETTKPSKQSNNKYAA |
| | | | SSYLSLTPEQWKSHRSYSCQVTHEGSTVEKTVAPTECS |
| | VL 4 | 561 | DIVLTQPPSVSGAPGQRVTISCSGSSSNIGSNYVSWYQQLPGTAP |
| | | | KLLIYNDNQRPSGVPDRFSGSKSGTSASLAITGLQSEDEADYYCS |
| | | | TYDRRTFSVFGGGTKLTVL |
| | LC CDR1 | 562 | SGSSSNIGSNYVS |
| | LC CDR2 | 563 | NDNQRPS |
| | LC CDR3 | 564 | STYDRRTFSV |
| | Light Chain | 558 | GQPKANPTVTLFPPSSEELQANKATLVCLISDFYPGAVTVAWKA |
| | Constant | | DGSPVKAGVETTKPSKQSNNKYAASSYLSLTPEQWKSHRSYSC |
| | Region | | QVTHEGSTVEKTVAPTECS |

BMM0456

| | | | |
|---|---|---|---|
| Polypeptide | Full | 515 | EVQLVESGGGLVQPGKSLKLSCEASGFTFSGYGMHWVRQAPGR |
| Chain 1 | Sequence | | GLESVAYITSSSINIKYADAVKGRFTVSRDNAKNLLFLQMNILKS |
| Hole | | | EDTAMYYCARFDWDKNYWGQGTMVTVSSAKTTAPSVYPLAP |
| | | | VSGDTTGSSVTLGCLVKGYFPEPVTLTWNSGSLSSGVHTFPAVL |
| | | | QSDLYTLSSSVTVTSSTWPSQSITCNVAHPASSTKVDKKIEPKSC |
| | | | DKTHTCPPCPAPNAAGGPSVFIFPPKIKDVLMISLSPIVTCVVVDV |
| | | | SEDDPDVQISWFVNNVEVHTAQTQTHREDYNSTLRVVSALPIQH |
| | | | QDWMSGKEFKCKVNNKDLGAPIERTISKPKGSVRAPQVYVLPPP |
| | | | EEEMTKKQVTLTCMVTDFMPEDIYVEWTNNGKTELNYKNTEP |
| | | | VLDSDGSYLMYSKLTVEKKNWVERNSYSCSVVHEGLHNHHTT |
| | | | KSFSRTPGK |
| | VH 1 | 567 | EVQLVESGGGLVQPGKSLKLSCEASGFTFSGYGMHWVRQAPGR |
| | | | GLESVAYITSSSINIKYADAVKGRFTVSRDNAKNLLFLQMNILKS |
| | | | EDTAMYYCARFDWDKNYWGQGTMVTVSS |
| | HC CDR1 | 568 | GFTFSGYGMH |
| | HC CDR2 | 569 | YITSSSINIKYADAVKG |
| | HC CDR3 | 570 | FDWDKNY |
| | Heavy | 571 | AKTTAPSVYPLAPVSGDTTGSSVTLGCLVKGYFPEPVTLTWNSG |
| | Chain | | SLSSGVHTFPAVLQSDLYTLSSSVTVTSSTWPSQSITCNVAHPAS |
| | Constant | | STKVDKKIEPKSCDKTHTCPPCPAPNAAGGPSVFIFPPKIKDVLMI |
| | Region | | SLSPTVTCVVVDVSEDDPDVQISWFVNNVEVHTAQTQTHREDY |
| | Hole | | NSTLRVVSALPIQHQDWMSGKEFKCKVNNKDLGAPIERTISKPK |
| | | | GSVRAPQVYVLPPPEEEMTKKQVTLTCMVTDFMPEDIYVEWTN |
| | | | NGKTELNYKNTEPVLDSDGSYLMYSKLTVEKKNWVERNSYSCS |
| | | | VVHEGLHNHHTTKSFSRTPGK |
| | CH1 | 572 | AKTTAPSVYPLAPVSGDTTGSSVTLGCLVKGYFPEPVTLTWNSG |
| | | | SLSSGVHTFPAVLQSDLYTLSSSVTVTSSTWPSQSITCNVAHPAS |
| | | | STKVDKKIEPKSC |
| | Fc (CH2- | 573 | DKTHTCPPCPAPNAAGGPSVFIFPPKIKDVLMISLSPIVTCVVVDV |
| | CH3) region | | SEDDPDVQISWFVNNVEVHTAQTQTHREDYNSTLRVVSALPIQH |
| | Hole | | QDWMSGKEFKCKVNNKDLGAPIERTISKPKGSVRAPQVYVLPPP |
| | | | EEEMTKKQVTLTCMVTDFMPEDIYVEWTNNGKTELNYKNTEP |
| | | | VLDSDGSYLMYSKLTVEKKNWVERNSYSCSVVHEGLHNHHTT |
| | | | KSFSRTPGK |
| Polypeptide | Full | 516 | DIQMTQSPSSLPASLGDRVTINCQASQDISNYLNWYQQKPGKAP |
| Chain 3 | Sequence | | KLLIYYTNKLADGVPSRFSGSGSGRDSSFTISSLESEDIGSYYCQQ |
| | | | YYNYPWTFGPGTKLEIKRADAAPTVSIFPPSSEQLTSGGASVVCF |
| | | | LNNFYPKDINVKWKIDGSERQNGVLNSWTDQDSKDSTYSMSST |
| | | | LTLTKDEYERHNSYTCEATHKTSTSPIVKSFNRNEC |
| | VL 1 | 574 | DIQMTQSPSSLPASLGDRVTINCQASQDISNYLNWYQQKPGKAP |
| | | | KLLIYYTNKLADGVPSRFSGSGSGRDSSFTISSLESEDIGSYYCQQ |
| | | | YYNYPWTFGPGTKLEIK |
| | LC CDR1 | 575 | QASQDISNYLN |
| | LC CDR2 | 576 | YTNKLAD |
| | LC CDR3 | 577 | QQYYNYPWT |
| | Light Chain | 3528 | RADAAPTVSIFPPSSEQLTSGGASVVCFLNNFYPKDINVKWKIDG |
| | Constant | | SERQNGVLNSWTDQDSKDSTYSMSSTLTLTKDEYERHNSYTCE |
| | Region | | ATHKTSTSPIVKSFNRNEC |
| Polypeptide | Full | 517 | QVQLVQSGAEVKKPGASVKVSCKASGYTFTGNYINWVRQAPG |
| Chain 2 | Sequence | | QGLEWMGIINPTKGWTLYAQKFQGRVTMTRDTSISTAYMELSS |
| Knob | | | LRSEDTAVYYCARWHHGTWIFDYWGQGTLVTVSSASTKGPSVF |
| | | | PLAPSSKSTSGGTAALGCLVKDYFPEPVTVSWNSGALTSGVHTF |
| | | | PAVLQSSGLYSLSSVVTVPSSSLGTQTYICNVNHKPSNTKVDKR |
| | | | VEPKSCDKTHTCPPCPAPNAAGGPSVFIFPPKIKDVLMISLSPIVT |
| | | | CVVVDVSEDDPDVQISWFVNNVEVHTAQTQTHREDYNSTLRVV |
| | | | SALPIQHQDWMSGKEFKCKVNNKDLGAPIERTISKPKGSVRAPQ |
| | | | VYVLPPPEEEMTKKQVTLTCMVKDFMPEDIYVEWTNNGKTELN |
| | | | YKNTEPVLDSDGSYFMYSRLRVEKKNWVERNSYSCSVVHEGLH |
| | | | NHHTTKSFSRTPGK |
| | VH 2 | 537 | QVQLVQSGAEVKKPGASVKVSCKASGYTFTGNYINWVRQAPG |
| | | | QGLEWMGIINPTKGWTLYAQKFQGRVTMTRDTSISTAYMELSS |
| | | | LRSEDTAVYYCARWHHGTWIFDYWGQGTLVTVSS |
| | HC CDR1 | 538 | GYTFTGNYIN |
| | HC CDR2 | 539 | IINPTKGWTLYAQKFQG |
| | HC CDR3 | 540 | WHHGTWIFDY |
| | Heavy | 578 | ASTKGPSVFPLAPSSKSTSGGTAALGCLVKDYFPEPVTVSWNSG |
| | Chain | | ALTSGVHTFPAVLQSSGLYSLSSVVTVPSSSLGTQTYICNVNHKP |
| | Constant | | SNTKVDKRVEPKSCDKTHTCPPCPAPNAAGGPSVFIFPPKIKDVL |
| | Region | | MISLSPIVTCVVVDVSEDDPDVQISWFVNNVEVHTAQTQTHRED |
| | Knob | | YNSTLRVVSALPIQHQDWMSGKEFKCKVNNKDLGAPIERTISKP |
| | | | KGSVRAPQVYVLPPPEEEMTKKQVTLTCMVKDFMPEDIYVEWT |
| | | | NNGKTELNYKNTEPVLDSDGSYFMYSRLRVEKKNWVERNSYS |
| | | | CSVVHEGLHNHHTTKSFSRTPGK |
| | CH1 | 549 | ASTKGPSVFPLAPSSKSTSGGTAALGCLVKDYFPEPVTVSWNSG |
| | | | ALTSGVHTFPAVLQSSGLYSLSSVVTVPSSSLGTQTYICNVNHKP |
| | | | SNTKVDKRVEPKSC |
| | Fc (CH2- | 579 | DKTHTCPPCPAPNAAGGPSVFIFPPKIKDVLMISLSPIVTCVVVDV |
| | CH3) region | | SEDDPDVQISWFVNNVEVHTAQTQTHREDYNSTLRVVSALPIQH |
| | Knob | | QDWMSGKEFKCKVNNKDLGAPIERTISKPKGSVRAPQVYVLPPP |
| | | | EEEMTKKQVTLTCMVKDFMPEDIYVEWTNNGKTELNYKNTEP |
| | | | VLDSDGSYFMYSRLRVEKKNWVERNSYSCSVVHEGLHNHHTT |
| | | | KSFSRTPGK |
| Polypeptide | Full | 510 | DIVLTQPPSVSGAPGQRVTISCSGSSSNIGSNYVSWYQQLPGTAP |
| Chain 4 | Sequence | | KLLIYNDNQRPSGVPDRFSGSKSGTSASLAITGLQSEDEADYYCS |
| | | | TYDRRTFSVFGGGTKLTVLGQPKANPTVTLFPPSSEELQANKAT |
| | | | LVCLISDFYPGAVTVAWKADGSPVKAGVETTKPSKQSNNKYAA |
| | | | SSYLSLTPEQWKSHRSYSCQVTHEGSTVEKTVAPTECS |
| | VL 2 | 561 | DIVLTQPPSVSGAPGQRVTISCSGSSSNIGSNYVSWYQQLPGTAP |
| | | | KLLIYNDNQRPSGVPDRFSGSKSGTSASLAITGLQSEDEADYYCS |
| | | | TYDRRTFSVFGGGTKLTVL |
| | LC CDR1 | 562 | SGSSSNIGSNYVS |
| | LC CDR2 | 563 | NDNQRPS |
| | LC CDR3 | 564 | STYDRRTFSV |
| | Light Chain | 558 | GQPKANPTVTLFPPSSEELQANKATLVCLISDFYPGAVTVAWKA |
| | Constant | | DGSPVKAGVETTKPSKQSNNKYAASSYLSLTPEQWKSHRSYSC |
| | Region | | QVTHEGSTVEKTVAPTECS |

BMM0469

| | | | |
|---|---|---|---|
| Polypeptide | Full | 515 | EVQLVESGGGLVQPGKSLKLSCEASGFTFSGYGMHWVRQAPGR |
| Chain 1 | Sequence | | GLESVAYITSSSINIKYADAVKGRFTVSRDNAKNLLFLQMNILKS |
| Hole | | | EDTAMYYCARFDWDKNYWGQGTMVTVSSAKTTAPSVYPLAP |
| | | | VSGDTTGSSVTLGCLVKGYFPEPVTLTWNSGSLSSGVHTFPAVL |
| | | | QSDLYTLSSSVTVTSSTWPSQSITCNVAHPASSTKVDKKIEPKSC |
| | | | DKTHTCPPCPAPNAAGGPSVFIFPPKIKDVLMISLSPIVTCVVVDV |
| | | | SEDDPDVQISWFVNNVEVHTAQTQTHREDYNSTLRVVSALPIQH |
| | | | QDWMSGKEFKCKVNNKDLGAPIERTISKPKGSVRAPQVYVLPPP |
| | | | EEEMTKKQVTLTCMVTDFMPEDIYVEWTNNGKTELNYKNTEP |
| | | | VLDSDGSYLMYSKLTVEKKNWVERNSYSCSVVHEGLHNHHTT |
| | | | KSFSRTPGK |
| | VH 1 | 567 | EVQLVESGGGLVQPGKSLKLSCEASGFTFSGYGMHWVRQAPGR |
| | | | GLESVAYITSSSINIKYADAVKGRFTVSRDNAKNLLFLQMNILKS |
| | | | EDTAMYYCARFDWDKNYWGQGTMVTVSS |
| | HC CDR1 | 568 | GFTFSGYGMH |
| | HC CDR2 | 569 | YITSSSINIKYADAVKG |
| | HC CDR3 | 570 | FDWDKNY |
| | Heavy | 571 | AKTTAPSVYPLAPVSGDTTGSSVTLGCLVKGYFPEPVTLTWNSG |
| | Chain | | SLSSGVHTFPAVLQSDLYTLSSSVTVTSSTWPSQSITCNVAHPAS |
| | Constant | | STKVDKKIEPKSCDKTHTCPPCPAPNAAGGPSVFIFPPKIKDVLMI |
| | Region | | SLSPIVTCVVVDVSEDDPDVQISWFVNNVEVHTAQTQTHREDY |
| | Hole | | NSTLRVVSALPIQHQDWMSGKEFKCKVNNKDLGAPIERTISKPK |
| | | | GSVRAPQVYVLPPPEEEMTKKQVTLTCMVTDFMPEDIYVEWTN |
| | | | NGKTELNYKNTEPVLDSDGSYLMYSKLTVEKKNWVERNSYSCS |
| | | | VVHEGLHNHHTTKSFSRTPGK |
| | CH1 | 572 | AKTTAPSVYPLAPVSGDTTGSSVTLGCLVKGYFPEPVTLTWNSG |
| | | | SLSSGVHTFPAVLQSDLYTLSSSVTVTSSTWPSQSITCNVAHPAS |
| | | | STKVDKKIEPKSC |
| | Fc (CH2- | 573 | DKTHTCPPCPAPNAAGGPSVFIFPPKIKDVLMISLSPIVTCVVVDV |
| | CH3) region | | SEDDPDVQISWFVNNVEVHTAQTQTHREDYNSTLRVVSALPIQH |
| | Hole | | QDWMSGKEFKCKVNNKDLGAPIERTISKPKGSVRAPQVYVLPPP |
| | | | EEEMTKKQVTLTCMVTDFMPEDIYVEWTNNGKTELNYKNTEP |
| | | | VLDSDGSYLMYSKLTVEKKNWVERNSYSCSVVHEGLHNHHTT |
| | | | KSFSRTPGK |
| Polypeptide | Full | 516 | DIQMTQSPSSLPASLGDRVTINCQASQDISNYLNWYQQKPGKAP |
| Chain 3 | Sequence | | KLLIYYTNKLADGVPSRFSGSGSGRDSSFTISSLESEDIGSYYCQQ |
| | | | YYNYPWTFGPGTKLEIKRADAAPTVSIFPPSSEQLTSGGASVVCF |
| | | | LNNFYPKDINVKWKIDGSERQNGVLNSWTDQDSKDSTYSMSST |
| | | | LTLTKDEYERHNSYTCEATHKTSTSPIVKSFNRNEC |
| | VL 1 | 574 | DIQMTQSPSSLPASLGDRVTINCQASQDISNYLNWYQQKPGKAP |
| | | | KLLIYYTNKLADGVPSRFSGSGSGRDSSFTISSLESEDIGSYYCQQ |
| | | | YYNYPWTFGPGTKLEIK |
| | LC CDR1 | 575 | QASQDISNYLN |
| | LC CDR2 | 576 | YTNKLAD |
| | LC CDR3 | 577 | QQYYNYPWT |
| | Light Chain | 3528 | RADAAPTVSIFPPSSEQLTSGGASVVCFLNNFYPKDINVKWKIDG |
| | Constant | | SERQNGVLNSWTDQDSKDSTYSMSSTLTLTKDEYERHNSYTCE |
| | Region | | ATHKTSTSPIVKSFNRNEC |
| Polypeptide | Full | 518 | QVQLVQSGAEVKKPGASVKVSCKASGYTFTGNYINWVRQAPG |
| Chain 2 | Sequence | | QGLEWMGIINPTKGWTLYAQKFQGRVTMTRDTSISTAYMELSS |
| Knob | | | LRSEDTAVYYCARWHHGTWIFDYWGQGTLVTVSSASTKGPSVF |
| | | | PLAPSSKSTSGGTAALGCLVKDYFPEPVTVSWNSGALTSGVHTF |
| | | | PAVLQSSGLYSLSSVVTVPSSSLGTQTYICNVNHKPSNTKVDKR |
| | | | VEPKSCDGGGGSGGGGSQVQLVQSGAEVKKPGASVKVSCKAS |
| | | | GYTFTGNYINWVRQAPGQGLEWMGIINPTKGWTLYAQKFQGR |
| | | | VTMTRDTSISTAYMELSSLRSEDTAVYYCARWHHGTWIFDYWG |
| | | | QGTLVTVSSASTKGPSVFPLAPSSKSTSGGTAALGCLVKDYFPEP |
| | | | VTVSWNSGALTSGVHTFPAVLQSSGLYSLSSVVTVPSSSLGTQT |
| | | | YICNVNHKPSNTKVDKRVEPKSCDKTHTCPPCPAPNAAGGPSVF |
| | | | IFPPKIKDVLMISLSPIVTCVVVDVSEDDPDVQISWFVNNVEVHT |
| | | | AQTQTHREDYNSTLRVVSALPIQHQDWMSGKEFKCKVNNKDL |
| | | | GAPIERTISKPKGSVRAPQVYVLPPPEEEMTKKQVTLTCMVKDF |
| | | | MPEDIYVEWTNNGKTELNYKNTEPVLDSDGSYFMYSRLRVEKK |
| | | | NWVERNSYSCSVVHEGLHNHHTTKSFSRTPGK |
| | VH 2 | 537 | QVQLVQSGAEVKKPGASVKVSCKASGYTFTGNYINWVRQAPG |
| | | | QGLEWMGIINPTKGWTLYAQKFQGRVTMTRDTSISTAYMELSS |
| | | | LRSEDTAVYYCARWHHGTWIFDYWGQGTLVTVSS |
| | HC CDR1 | 538 | GYTFTGNYIN |
| | HC CDR2 | 539 | IINPTKGWTLYAQKFQG |
| | HC CDR3 | 540 | WHHGTWIFDY |
| | CH1 | 548 | ASTKGPSVFPLAPSSKSTSGGTAALGCLVKDYFPEPVTVSWNSG |
| | | | ALTSGVHTFPAVLQSSGLYSLSSVVTVPSSSLGTQTYICNVNHKP |
| | | | SNTKVDKRVEPKSCD |
| | Linker | 3308 | GGGGSGGGGS |
| | VH 3 | 537 | QVQLVQSGAEVKKPGASVKVSCKASGYTFTGNYINWVRQAPG |
| | | | QGLEWMGIINPTKGWTLYAQKFQGRVTMTRDTSISTAYMELSS |
| | | | LRSEDTAVYYCARWHHGTWIFDYWGQGTLVTVSS |
| | HC CDR1 | 538 | GYTFTGNYIN |
| | HC CDR2 | 539 | IINPTKGWTLYAQKFQG |
| | HC CDR3 | 540 | WHHGTWIFDY |
| | Heavy | 578 | ASTKGPSVFPLAPSSKSTSGGTAALGCLVKDYFPEPVTVSWNSG |
| | Chain | | ALTSGVHTFPAVLQSSGLYSLSSVVTVPSSSLGTQTYICNVNHKP |
| | Constant | | SNTKVDKRVEPKSCDKTHTCPPCPAPNAAGGPSVFIFPPKIKDVL |
| | Region | | MISLSPIVTCVVVDVSEDDPDVQISWFVNNVEVHTAQTQTHRED |
| | Knob | | YNSTLRVVSALPIQHQDWMSGKEFKCKVNNKDLGAPIERTISKP |
| | | | KGSVRAPQVYVLPPPEEEMTKKQVTLTCMVKDFMPEDIYVEWT |
| | | | NNGKTELNYKNTEPVLDSDGSYFMYSRLRVEKKNWVERNSYS |
| | | | CSVVHEGLHNHHTTKSFSRTPGK |
| | CH1 | 549 | ASTKGPSVFPLAPSSKSTSGGTAALGCLVKDYFPEPVTVSWNSG |
| | | | ALTSGVHTFPAVLQSSGLYSLSSVVTVPSSSLGTQTYICNVNHKP |
| | | | SNTKVDKRVEPKSC |
| | Fc (CH2- | 579 | DKTHTCPPCPAPNAAGGPSVFIFPPKIKDVLMISLSPIVTCVVVDV |
| | CH3) region | | SEDDPDVQISWFVNNVEVHTAQTQTHREDYNSTLRVVSALPIQH |
| | Knob | | QDWMSGKEFKCKVNNKDLGAPIERTISKPKGSVRAPQVYVLPPP |
| | | | EEEMTKKQVTLTCMVKDFMPEDIYVEWTNNGKTELNYKNTEP |
| | | | VLDSDGSYFMYSRLRVEKKNWVERNSYSCSVVHEGLHNHHTT |
| | | | KSFSRTPGK |
| Polypeptide | Full | 510 | DIVLTQPPSVSGAPGQRVTISCSGSSSNIGSNYVSWYQQLPGTAP |
| Chain 4 | Sequence | | KLLIYNDNQRPSGVPDRFSGSKSGTSASLAITGLQSEDEADYYCS |
| | | | TYDRRTFSVFGGGTKLTVLGQPKANPTVTLFPPSSEELQANKAT |
| | | | LVCLISDFYPGAVTVAWKADGSPVKAGVETTKPSKQSNNKYAA |
| | | | SSYLSLTPEQWKSHRSYSCQVTHEGSTVEKTVAPTECS |
| | VL 2 or 3 | 561 | DIVLTQPPSVSGAPGQRVTISCSGSSSNIGSNYVSWYQQLPGTAP |
| | | | KLLIYNDNQRPSGVPDRFSGSKSGTSASLAITGLQSEDEADYYCS |
| | | | TYDRRTFSVFGGGTKLTVL |
| | LC CDR1 | 562 | SGSSSNIGSNYVS |
| | LC CDR2 | 563 | NDNQRPS |
| | LC CDR3 | 564 | STYDRRTFSV |
| | Light Chain | 558 | GQPKANPTVTLFPPSSEELQANKATLVCLISDFYPGAVTVAWKA |
| | Constant | | DGSPVKAGVETTKPSKQSNNKYAASSYLSLTPEQWKSHRSYSC |
| | Region | | QVTHEGSTVEKTVAPTECS |

BNM0094

| | | | |
|---|---|---|---|
| Polypeptide | Full | 519 | EVQLQQSGAELVRPGALVKLSCKTSGFNIKDYFLHWVRQRPDQ |
| Chain 1 | Sequence | | GLEWIGWINPDNGNTVYDPKFQGTASLTADTSSNTVYLQLSGLT |
| Hole | | | SEDTAVYFCTRRDYTYEKAALDYWGQGASVIVSSAKTTAPSVY |
| | | | PLAPVSGDTTGSSVTLGCLVKGYFPEPVTLTWNSGSLSSGVHTFP |
| | | | AVLQSDLYTLSSSVTVTSSTWPSQSITCNVAHPASSTKVDKKIEP |
| | | | KSCDKTHTCPPCPAPNAAGGPSVFIFPPKIKDVLMISLSPIVTCVV |
| | | | VDVSEDDPDVQISWFVNNVEVHTAQTQTHREDYNSTLRVVSAL |
| | | | PIQHQDWMSGKEFKCKVNNKDLGAPIERTISKPKGSVRAPQVCV |
| | | | LPPPEEEMTKKQVTLSCAVTDFMPEDIYVEWTNNGKTELNYKN |
| | | | TEPVLDSDGSYFMVSKLRVEKKNWVERNSYSCSVVHEGLHNH |
| | | | HTTKSFSRTPGK |
| | VH 1 | 580 | EVQLQQSGAELVRPGALVKLSCKTSGFNIKDYFLHWVRQRPDQ |
| | | | GLEWIGWINPDNGNTVYDPKFQGTASLTADTSSNTVYLQLSGLT |
| | | | SEDTAVYFCTRRDYTYEKAALDYWGQGASVIVSS |
| | HC CDR1 | 581 | GFNIKDYFLH |
| | HC CDR2 | 582 | WINPDNGNTVYDPKFQG |
| | HC CDR3 | 583 | RDYTYEKAALDY |
| | Heavy | 584 | AKTTAPSVYPLAPVSGDTTGSSVTLGCLVKGYFPEPVTLTWNSG |
| | Chain | | SLSSGVHTFPAVLQSDLYTLSSSVTVTSSTWPSQSITCNVAHPAS |
| | Constant | | STKVDKKIEPKSCDKTHTCPPCPAPNAAGGPSVFIFPPKIKDVLMI |
| | Region | | SLSPIVTCVVVDVSEDDPDVQISWFVNNVEVHTAQTQTHREDY |
| | Hole | | NSTLRVVSALPIQHQDWMSGKEFKCKVNNKDLGAPIERTISKPK |
| | | | GSVRAPQVCVLPPPEEEMTKKQVTLSCAVTDFMPEDIYVEWTN |
| | | | NGKTELNYKNTEPVLDSDGSYFMVSKLRVEKKNWVERNSYSCS |
| | | | VVHEGLHNHHTTKSFSRTPGK |
| | CH1 | 572 | AKTTAPSVYPLAPVSGDTTGSSVTLGCLVKGYFPEPVTLTWNSG |
| | | | SLSSGVHTFPAVLQSDLYTLSSSVTVTSSTWPSQSITCNVAHPAS |
| | | | STKVDKKIEPKSC |
| | Fc (CH2- | 560 | DKTHTCPPCPAPNAAGGPSVFIFPPKIKDVLMISLSPIVTCVVVDV |
| | CH3) region | | SEDDPDVQISWFVNNVEVHTAQTQTHREDYNSTLRVVSALPIQH |
| | Hole | | QDWMSGKEFKCKVNNKDLGAPIERTISKPKGSVRAPQVCVLPPP |
| | | | EEEMTKKQVTLSCAVTDFMPEDIYVEWTNNGKTELNYKNTEPV |
| | | | LDSDGSYFMVSKLRVEKKNWVERNSYSCSVVHEGLHNHHTTK |
| | | | SFSRTPGK |
| Polypeptide | Full | 520 | AIQMSQSPASLSASVGETVTITCRASGNIYNYLAWYQQKQGKSP |
| Chain 3 | Sequence | | HLLVYDAKTLADGVPSRFSGSGSGTQYSLKISSLQTEDSGNYYC |
| | | | QHFWSLPFTFGSGTKLEIKRADAAPTVSIFPPSSEQLTSGGASVV |
| | | | CFLNNFYPKDINVKWKIDGSERQNGVLNSWTDQDSKDSTYSMS |
| | | | STLTLTKDEYERHNSYTCEATHKTSTSPIVKSFNRNEC |
| | VL 1 | 585 | AIQMSQSPASLSASVGETVTITCRASGNIYNYLAWYQQKQGKSP |
| | | | HLLVYDAKTLADGVPSRFSGSGSGTQYSLKISSLQTEDSGNYYC |
| | | | QHFWSLPFTFGSGTKLEIK |
| | LC CDR1 | 586 | RASGNIYNYLA |
| | LC CDR2 | 587 | DAKTLAD |
| | LC CDR3 | 588 | QHFWSLPFT |
| | Light Chain | 3528 | RADAAPTVSIFPPSSEQLTSGGASVVCFLNNFYPKDINVKWKIDG |
| | Constant | | SERQNGVLNSWTDQDSKDSTYSMSSTLTLTKDEYERHNSYTCE |
| | Region | | ATHKTSTSPIVKSFNRNEC |
| Polypeptide | Full | 511 | QVQLQQSGTELMKPGASVKISCKASGYTFSNYWIEWIKQRPGH |
| Chain 2 | Sequence | | GLEWVGEILPGAGPTNYNEKFKGKATFTADSSSNTAYMQLSSLT |
| Knob | | | SEDSAVYYCARTDYDYDWFAYWGQGTLVTVSAGGGGSGGGG |
| | | | SGGGGSGGGGSDIVMSQSPSSLAVSVGEKVTMSCKSSQSLLYSG |
| | | | NQKNYLAWYQQKPGQSPKLLIYWASTRESGVPDRFTGSGSGTD |
| | | | FTLTINSVKAEDLTVYYCQQYYGYPRTFGGGTKVEIKGGGGSG |
| | | | GGGSGGGGSAPTSSSTKKTQLQLEHLLLDLQMILNGINNYKNPK |
| | | | LTRMLTFKFYMPKKATELKHLQCLEEELKPLEEVLNLAQSKNFH |
| | | | LRPRDLISNINVIVLELKGSETTFMCEYADETATIVEFLNRWITFC |
| | | | QSIISTLTGGGGSGGGGSDKTHTCPPCPAPNAAGGPSVFIFPPKIK |
| | | | DVLMISLSPIVTCVVVDVSEDDPDVQISWFVNNVEVHTAQTQTH |
| | | | REDYNSTLRVVSALPIQHQDWMSGKEFKCKVNNKDLGAPIERTI |
| | | | SKPKGSVRAPQVYVLPPCEEEMTKKQVTLWCMVTDFMPEDIYV |
| | | | EWTNNGKTELNYKNTEPVLDSDGSYFMYSKLRVEKKNWVERN |
| | | | SYSCSVVHEGLHNHHTTKSFSRTPGK |
| | scFv | 1376 | QVQLQQSGTELMKPGASVKISCKASGYTFSNYWIEWIKQRPGH |
| | | | GLEWVGEILPGAGPTNYNEKFKGKATFTADSSSNTAYMQLSSLT |
| | | | SEDSAVYYCARTDYDYDWFAYWGQGTLVTVSAGGGGSGGGG |
| | | | SGGGGSGGGGSDIVMSQSPSSLAVSVGEKVTMSCKSSQSLLYSG |
| | | | NQKNYLAWYQQKPGQSPKLLIYWASTRESGVPDRFTGSGSGTD |
| | | | FTLTINSVKAEDLTVYYCQQYYGYPRTFGGGTKVEIK |
| | VH 2 | 541 | QVQLQQSGTELMKPGASVKISCKASGYTFSNYWIEWIKQRPGH |
| | | | GLEWVGEILPGAGPTNYNEKFKGKATFTADSSSNTAYMQLSSLT |
| | | | SEDSAVYYCARTDYDYDWFAYWGQGTLVTVSA |
| | HC CDR1 | 542 | GYTFSNYWIE |
| | HC CDR2 | 543 | EILPGAGPTNYNEKFKG |
| | HC CDR3 | 544 | TDYDYDWFAY |
| | Linker 1 | 3801 | GGGGSGGGGSGGGGSGGGGS |
| | VL 2 | 3527 | DIVMSQSPSSLAVSVGEKVTMSCKSSQSLLYSGNQKNYLAWYQ |
| | | | QKPGQSPKLLIYWASTRESGVPDRFTGSGSGTDFTLTINSVKAED |
| | | | LTVYYCQQYYGYPRTFGGGTKVEIK |
| | LC CDR1 | 545 | KSSQSLLYSGNQKNYLA |
| | LC CDR2 | 546 | WASTRES |
| | LC CDR3 | 547 | QQYYGYPRT |
| | Linker 2 | 3309 | GGGGSGGGGSGGGGS |
| | IL-2 | 2191 | APTSSSTKKTQLQLEHLLLDLQMILNGINNYKNPKLTRMLTFKF |
| | | | YMPKKATELKHLQCLEEELKPLEEVLNLAQSKNFHLRPRDLISNI |
| | | | NVIVLELKGSETTFMCEYADETATIVEFLNRWITFCQSIISTLT |
| | Linker 3 | 3308 | GGGGSGGGGS |
| | Fc (CH2- | 3533 | DKTHTCPPCPAPNAAGGPSVFIFPPKIKDVLMISLSPIVTCVVVDV |
| | CH3) region | | SEDDPDVQISWFVNNVEVHTAQTQTHREDYNSTLRVVSALPIQH |
| | Knob | | QDWMSGKEFKCKVNNKDLGAPIERTISKPKGSVRAPQVYVLPP |
| | mouse Fc | | CEEEMTKKQVTLWCMVTDFMPEDIYVEWTNNGKTELNYKNTE |
| | heavy chain | | PVLDSDGSYFMYSKLRVEKKNWVERNSYSCSVVHEGLHNHHT |
| | comprising | | TKSFSRTPGK |
| | LALAPG | | |
| | mutations | | |
| | (L234A | | |
| | L235A and | | |
| | P329G) | | |

BNM0104

| | | | |
|---|---|---|---|
| Polypeptide | Full | 519 | EVQLQQSGAELVRPGALVKLSCKTSGFNIKDYFLHWVRQRPDQ |
| Chain 1 | Sequence | | GLEWIGWINPDNGNTVYDPKFQGTASLTADTSSNTVYLQLSGLT |
| Hole | | | SEDTAVYFCTRRDYTYEKAALDYWGQGASVIVSSAKTTAPSVY |
| | | | PLAPVSGDTTGSSVTLGCLVKGYFPEPVTLTWNSGSLSSGVHTFP |
| | | | AVLQSDLYTLSSSVTVTSSTWPSQSITCNVAHPASSTKVDKKIEP |
| | | | KSCDKTHTCPPCPAPNAAGGPSVFIFPPKIKDVLMISLSPIVTCVV |
| | | | VDVSEDDPDVQISWFVNNVEVHTAQTQTHREDYNSTLRVVSAL |
| | | | PIQHQDWMSGKEFKCKVNNKDLGAPIERTISKPKGSVRAPQVCV |
| | | | LPPPEEEMTKKQVTLSCAVTDFMPEDIYVEWTNNGKTELNYKN |
| | | | TEPVLDSDGSYFMVSKLRVEKKNWVERNSYSCSVVHEGLHNH |
| | | | HTTKSFSRTPGK |
| | VH 1 | 580 | EVQLQQSGAELVRPGALVKLSCKTSGFNIKDYFLHWVRQRPDQ |
| | | | GLEWIGWINPDNGNTVYDPKFQGTASLTADTSSNTVYLQLSGLT |
| | | | SEDTAVYFCTRRDYTYEKAALDYWGQGASVIVSS |
| | HC CDR1 | 581 | GFNIKDYFLH |
| | HC CDR2 | 582 | WINPDNGNTVYDPKFQG |
| | HC CDR3 | 583 | RDYTYEKAALDY |
| | Heavy | 584 | AKTTAPSVYPLAPVSGDTTGSSVTLGCLVKGYFPEPVTLTWNSG |
| | Chain | | SLSSGVHTFPAVLQSDLYTLSSSVTVTSSTWPSQSITCNVAHPAS |
| | Constant | | STKVDKKIEPKSCDKTHTCPPCPAPNAAGGPSVFIFPPKIKDVLMI |
| | Region | | SLSPIVTCVVVDVSEDDPDVQISWFVNNVEVHTAQTQTHREDY |
| | Hole | | NSTLRVVSALPIQHQDWMSGKEFKCKVNNKDLGAPIERTISKPK |
| | | | GSVRAPQVCVLPPPEEEMTKKQVTLSCAVTDFMPEDIYVEWTN |
| | | | NGKTELNYKNTEPVLDSDGSYFMVSKLRVEKKNWVERNSYSCS |
| | | | VVHEGLHNHHTTKSFSRTPGK |
| | CH1 | 572 | AKTTAPSVYPLAPVSGDTTGSSVTLGCLVKGYFPEPVTLTWNSG |
| | | | SLSSGVHTFPAVLQSDLYTLSSSVTVTSSTWPSQSITCNVAHPAS |
| | | | STKVDKKIEPKSC |
| | Fc (CH2- | 560 | DKTHTCPPCPAPNAAGGPSVFIFPPKIKDVLMISLSPIVTCVVVDV |
| | CH3) region | | SEDDPDVQISWFVNNVEVHTAQTQTHREDYNSTLRVVSALPIQH |
| | Hole | | QDWMSGKEFKCKVNNKDLGAPIERTISKPKGSVRAPQVCVLPPP |
| | | | EEEMTKKQVTLSCAVTDFMPEDIYVEWTNNGKTELNYKNTEPV |
| | | | LDSDGSYFMVSKLRVEKKNWVERNSYSCSVVHEGLHNHHTTK |
| | | | SFSRTPGK |
| Polypeptide | Full | 520 | AIQMSQSPASLSASVGETVTITCRASGNIYNYLAWYQQKQGKSP |
| Chain 3 | Sequence | | HLLVYDAKTLADGVPSRFSGSGSGTQYSLKISSLQTEDSGNYYC |
| | | | QHFWSLPFTFGSGTKLEIKRADAAPTVSIFPPSSEQLTSGGASVV |
| | | | CFLNNFYPKDINVKWKIDGSERQNGVLNSWTDQDSKDSTYSMS |
| | | | STLTLTKDEYERHNSYTCEATHKTSTSPIVKSFNRNEC |
| | VL 1 | 585 | AIQMSQSPASLSASVGETVTITCRASGNIYNYLAWYQQKQGKSP |
| | | | HLLVYDAKTLADGVPSRFSGSGSGTQYSLKISSLQTEDSGNYYC |
| | | | QHFWSLPFTFGSGTKLEIK |
| | LC CDR1 | 586 | RASGNIYNYLA |
| | LC CDR2 | 587 | DAKTLAD |
| | LC CDR3 | 588 | QHFWSLPFT |
| | Light Chain | 3528 | RADAAPTVSIFPPSSEQLTSGGASVVCFLNNFYPKDINVKWKIDG |
| | Constant | | SERQNGVLNSWTDQDSKDSTYSMSSTLTLTKDEYERHNSYTCE |
| | Region | | ATHKTSTSPIVKSFNRNEC |
| Polypeptide | Full | 513 | QVQLQQSGTELMKPGASVKISCKASGYTFSNYWIEWIKQRPGH |
| Chain 2 | Sequence | | GLEWVGEILPGAGPTNYNEKFKGKATFTADSSSNTAYMQLSSLT |
| Knob | | | SEDSAVYYCARTDYDYDWFAYWGQGTLVTVSAGGGGSGGGG |
| | | | SGGGGSGGGGSDIVMSQSPSSLAVSVGEKVTMSCKSSQSLLYSG |
| | | | NQKNYLAWYQQKPGQSPKLLIYWASTRESGVPDRFTGSGSGTD |
| | | | FTLTINSVKAEDLTVYYCQQYYGYPRTFGGGTKVEIKGGGGSD |
| | | | KTHTCPPCPAPNAAGGPSVFIFPPKIKDVLMISLSPIVTCVVVDVS |
| | | | EDDPDVQISWFVNNVEVHTAQTQTHREDYNSTLRVVSALPIQH |
| | | | QDWMSGKEFKCKVNNKDLGAPIERTISKPKGSVRAPQVYVLPP |
| | | | CEEEMTKKQVTLWCMVTDFMPEDIYVEWTNNGKTELNYKNTE |
| | | | PVLDSDGSYFMYSKLRVEKKNWVERNSYSCSVVHEGLHNHHT |
| | | | TKSFSRTPGK |
| | scFv | 1376 | QVQLQQSGTELMKPGASVKISCKASGYTFSNYWIEWIKQRPGH |
| | | | GLEWVGEILPGAGPTNYNEKFKGKATFTADSSSNTAYMQLSSLT |
| | | | SEDSAVYYCARTDYDYDWFAYWGQGTLVTVSAGGGGSGGGG |
| | | | SGGGGSGGGGSDIVMSQSPSSLAVSVGEKVTMSCKSSQSLLYSG |
| | | | NQKNYLAWYQQKPGQSPKLLIYWASTRESGVPDRFTGSGSGTD |
| | | | FTLTINSVKAEDLTVYYCQQYYGYPRTFGGGTKVEIK |
| | VH 2 | 541 | QVQLQQSGTELMKPGASVKISCKASGYTFSNYWIEWIKQRPGH |
| | | | GLEWVGEILPGAGPTNYNEKFKGKATFTADSSSNTAYMQLSSLT |
| | | | SEDSAVYYCARTDYDYDWFAYWGQGTLVTVSA |
| | HC CDR1 | 542 | GYTFSNYWIE |
| | HC CDR2 | 543 | EILPGAGPTNYNEKFKG |
| | HC CDR3 | 544 | TDYDYDWFAY |
| | Linker 1 | 3801 | GGGGSGGGGSGGGGSGGGGS |
| | VL 2 | 3527 | DIVMSQSPSSLAVSVGEKVTMSCKSSQSLLYSGNQKNYLAWYQ |
| | | | QKPGQSPKLLIYWASTRESGVPDRFTGSGSGTDFTLTINSVKAED |
| | | | LTVYYCQQYYGYPRTFGGGTKVEIK |
| | LC CDR1 | 545 | KSSQSLLYSGNQKNYLA |
| | LC CDR2 | 546 | WASTRES |
| | LC CDR3 | 547 | QQYYGYPRT |
| | Linker 2 | 3307 | GGGGS |
| | Fc (CH2- | 3533 | DKTHTCPPCPAPNAAGGPSVFIFPPKIKDVLMISLSPIVTCVVVDV |
| | CH3) region | | SEDDPDVQISWFVNNVEVHTAQTQTHREDYNSTLRVVSALPIQH |
| | Knob | | QDWMSGKEFKCKVNNKDLGAPIERTISKPKGSVRAPQVYVLPP |
| | mouse Fc | | CEEEMTKKQVTLWCMVTDFMPEDIYVEWTNNGKTELNYKNTE |
| | heavy chain | | PVLDSDGSYFMYSKLRVEKKNWVERNSYSCSVVHEGLHNHHT |
| | comprising | | TKSFSRTPGK |
| | LALAPG | | |
| | mutations | | |
| | (L234A | | |
| | L235A and | | |
| | P329G) | | |

BJM0869

| | | | |
|---|---|---|---|
| Polypeptide | Full | 521 | QVQLQQSGTELMKPGASVKISCKASGYTFSNYWIEWIKQRPGH |
| Chain 1 | Sequence | | GLEWVGEILPGAGPTNYNEKFKGKATFTADSSSNTAYMQLSSLT |
| | | | SEDSAVYYCARTDYDYDWFAYWGQGTLVTVSAGGGGSGGGG |
| | | | SGGGGSGGGGSDIVMSQSPSSLAVSVGEKVTMSCKSSQSLLYSG |
| | | | NQKNYLAWYQQKPGQSPKLLIYWASTRESGVPDRFTGSGSGTD |
| | | | FTLTINSVKAEDLTVYYCQQYYGYPRTFGGGTKVEIKGGGGSEV |
| | | | QLQQSGAELVRPGALVKLSCKTSGFNIKDYFLHWVRQRPDQGL |
| | | | EWIGWINPDNGNTVYDPKFQGTASLTADTSSNTVYLQLSGLTSE |
| | | | DTAVYFCTRRDYTYEKAALDYWGQGASVIVSSAKTTAPSVYPL |
| | | | APVSGDTTGSSVTLGCLVKGYFPEPVTLTWNSGSLSSGVHTFPA |
| | | | VLQSDLYTLSSSVTVTSSTWPSQSITCNVAHPASSTKVDKKIEPK |
| | | | SCDKTHTCPPCPAPNAAGGPSVFIFPPKIKDVLMISLSPIVTCVVV |
| | | | DVSEDDPDVQISWFVNNVEVHTAQTQTHREDYNSTLRVVSALPI |
| | | | QHQDWMSGKEFKCKVNNKDLGAPIERTISKPKGSVRAPQVYVL |
| | | | PPPEEEMTKKQVTLTCMVTDFMPEDIYVEWTNNGKTELNYKNT |
| | | | EPVLDSDGSYFMYSKLRVEKKNWVERNSYSCSVVHEGLHNHH |
| | | | TTKSFSRTPGK |
| | scFv | 1376 | QVQLQQSGTELMKPGASVKISCKASGYTFSNYWIEWIKQRPGH |
| | | | GLEWVGEILPGAGPTNYNEKFKGKATFTADSSSNTAYMQLSSLT |
| | | | SEDSAVYYCARTDYDYDWFAYWGQGTLVTVSAGGGGSGGGG |
| | | | SGGGGSGGGGSDIVMSQSPSSLAVSVGEKVTMSCKSSQSLLYSG |
| | | | NQKNYLAWYQQKPGQSPKLLIYWASTRESGVPDRFTGSGSGTD |
| | | | FTLTINSVKAEDLTVYYCQQYYGYPRTFGGGTKVEIK |
| | VH 1 | 541 | QVQLQQSGTELMKPGASVKISCKASGYTFSNYWIEWIKQRPGH |
| | | | GLEWVGEILPGAGPTNYNEKFKGKATFTADSSSNTAYMQLSSLT |
| | | | SEDSAVYYCARTDYDYDWFAYWGQGTLVTVSA |
| | HC CDR1 | 542 | GYTFSNYWIE |
| | HC CDR2 | 543 | EILPGAGPTNYNEKFKG |
| | HC CDR3 | 544 | TDYDYDWFAY |
| | Linker 1 | 3801 | GGGGSGGGGSGGGGSGGGGS |
| | VL 1 | 3527 | DIVMSQSPSSLAVSVGEKVTMSCKSSQSLLYSGNQKNYLAWYQ |
| | | | QKPGQSPKLLIYWASTRESGVPDRFTGSGSGTDFTLTINSVKAED |
| | | | LTVYYCQQYYGYPRTFGGGTKVEIK |
| | LC CDR1 | 545 | KSSQSLLYSGNQKNYLA |
| | LC CDR2 | 546 | WASTRES |
| | LC CDR3 | 547 | QQYYGYPRT |
| | Linker 2 | 3307 | GGGGS |
| | VH 2 | 580 | EVQLQQSGAELVRPGALVKLSCKTSGFNIKDYFLHWVRQRPDQ |
| | | | GLEWIGWINPDNGNTVYDPKFQGTASLTADTSSNTVYLQLSGLT |
| | | | SEDTAVYFCTRRDYTYEKAALDYWGQGASVIVSS |
| | HC CDR1 | 581 | GFNIKDYFLH |
| | HC CDR2 | 582 | WINPDNGNTVYDPKFQG |
| | HC CDR3 | 583 | RDYTYEKAALDY |
| | Heavy | 589 | AKTTAPSVYPLAPVSGDTTGSSVTLGCLVKGYFPEPVTLTWNSG |
| | Chain | | SLSSGVHTFPAVLQSDLYTLSSSVTVTSSTWPSQSITCNVAHPAS |
| | Constant | | STKVDKKIEPKSCDKTHTCPPCPAPNAAGGPSVFIFPPKIKDVLMI |
| | Region | | SLSPIVTCVVVDVSEDDPDVQISWFVNNVEVHTAQTQTHREDY |
| | | | NSTLRVVSALPIQHQDWMSGKEFKCKVNNKDLGAPIERTISKPK |
| | | | GSVRAPQVYVLPPPEEEMTKKQVTLTCMVTDFMPEDIYVEWTN |
| | | | NGKTELNYKNTEPVLDSDGSYFMYSKLRVEKKNWVERNSYSCS |
| | | | VVHEGLHNHHTTKSFSRTPGK |
| | CH1 | 572 | AKTTAPSVYPLAPVSGDTTGSSVTLGCLVKGYFPEPVTLTWNSG |
| | | | SLSSGVHTFPAVLQSDLYTLSSSVTVTSSTWPSQSITCNVAHPAS |
| | | | STKVDKKIEPKSC |
| | Fc (CH2- | 566 | DKTHTCPPCPAPNAAGGPSVFIFPPKIKDVLMISLSPIVTCVVVDV |
| | CH3) region | | SEDDPDVQISWFVNNVEVHTAQTQTHREDYNSTLRVVSALPIQH |
| | | | QDWMSGKEFKCKVNNKDLGAPIERTISKPKGSVRAPQVYVLPPP |
| | | | EEEMTKKQVTLTCMVTDFMPEDIYVEWTNNGKTELNYKNTEP |
| | | | VLDSDGSYFMYSKLRVEKKNWVERNSYSCSVVHEGLHNHHTT |
| | | | KSFSRTPGK |
| Polypeptide | Full | 520 | AIQMSQSPASLSASVGETVTITCRASGNIYNYLAWYQQKQGKSP |
| Chain 3 | Sequence | | HLLVYDAKTLADGVPSRFSGSGSGTQYSLKISSLQTEDSGNYYC |
| | | | QHFWSLPFTFGSGTKLEIKRADAAPTVSIFPPSSEQLTSGGASVV |
| | | | CFLNNFYPKDINVKWKIDGSERQNGVLNSWTDQDSKDSTYSMS |
| | | | STLTLTKDEYERHNSYTCEATHKTSTSPIVKSFNRNEC |
| | VL 2 | 585 | AIQMSQSPASLSASVGETVTITCRASGNIYNYLAWYQQKQGKSP |
| | | | HLLVYDAKTLADGVPSRFSGSGSGTQYSLKISSLQTEDSGNYYC |
| | | | QHFWSLPFTFGSGTKLEIK |
| | LC CDR1 | 586 | RASGNIYNYLA |
| | LC CDR2 | 587 | DAKTLAD |
| | LC CDR3 | 588 | QHFWSLPFT |
| | Light Chain | 3528 | RADAAPTVSIFPPSSEQLTSGGASVVCFLNNFYPKDINVKWKIDG |
| | Constant | | SERQNGVLNSWTDQDSKDSTYSMSSTLTLTKDEYERHNSYTCE |
| | Region | | ATHKTSTSPIVKSFNRNEC |
| Polypeptide | Full | 521 | QVQLQQSGTELMKPGASVKISCKASGYTFSNYWIEWIKQRPGH |
| Chain 2 | Sequence | | GLEWVGEILPGAGPTNYNEKFKGKATFTADSSSNTAYMQLSSLT |
| | | | SEDSAVYYCARTDYDYDWFAYWGQGTLVTVSAGGGGSGGGG |
| | | | SGGGGSGGGGSDIVMSQSPSSLAVSVGEKVTMSCKSSQSLLYSG |
| | | | NQKNYLAWYQQKPGQSPKLLIYWASTRESGVPDRFTGSGSGTD |
| | | | FTLTINSVKAEDLTVYYCQQYYGYPRTFGGGTKVEIKGGGGSEV |
| | | | QLQQSGAELVRPGALVKLSCKTSGFNIKDYFLHWVRQRPDQGL |
| | | | EWIGWINPDNGNTVYDPKFQGTASLTADTSSNTVYLQLSGLTSE |
| | | | DTAVYFCTRRDYTYEKAALDYWGQGASVIVSSAKTTAPSVYPL |
| | | | APVSGDTTGSSVTLGCLVKGYFPEPVTLTWNSGSLSSGVHTFPA |
| | | | VLQSDLYTLSSSVTVTSSTWPSQSITCNVAHPASSTKVDKKIEPK |
| | | | SCDKTHTCPPCPAPNAAGGPSVFIFPPKIKDVLMISLSPIVTCVVV |
| | | | DVSEDDPDVQISWFVNNVEVHTAQTQTHREDYNSTLRVVSALPI |
| | | | QHQDWMSGKEFKCKVNNKDLGAPIERTISKPKGSVRAPQVYVL |
| | | | PPPEEEMTKKQVTLTCMVTDFMPEDIYVEWTNNGKTELNYKNT |
| | | | EPVLDSDGSYFMYSKLRVEKKNWVERNSYSCSVVHEGLHNHH |
| | | | TTKSFSRTPGK |
| | scFv | 1376 | QVQLQQSGTELMKPGASVKISCKASGYTFSNYWIEWIKQRPGH |
| | | | GLEWVGEILPGAGPTNYNEKFKGKATFTADSSSNTAYMQLSSLT |
| | | | SEDSAVYYCARTDYDYDWFAYWGQGTLVTVSAGGGGSGGGG |
| | | | SGGGGSGGGGSDIVMSQSPSSLAVSVGEKVTMSCKSSQSLLYSG |
| | | | NQKNYLAWYQQKPGQSPKLLIYWASTRESGVPDRFTGSGSGTD |
| | | | FTLTINSVKAEDLTVYYCQQYYGYPRTFGGGTKVEIK |
| | VH 3 | 541 | QVQLQQSGTELMKPGASVKISCKASGYTFSNYWIEWIKQRPGH |
| | | | GLEWVGEILPGAGPTNYNEKFKGKATFTADSSSNTAYMQLSSLT |
| | | | SEDSAVYYCARTDYDYDWFAYWGQGTLVTVSA |
| | HC CDR1 | 542 | GYTFSNYWIE |
| | HC CDR2 | 543 | EILPGAGPTNYNEKFKG |
| | HC CDR3 | 544 | TDYDYDWFAY |
| | Linker 3 | 3801 | GGGGSGGGGSGGGGSGGGGS |
| | VL 3 | 3527 | DIVMSQSPSSLAVSVGEKVTMSCKSSQSLLYSGNQKNYLAWYQ |
| | | | QKPGQSPKLLIYWASTRESGVPDRFTGSGSGTDFTLTINSVKAED |
| | | | LTVYYCQQYYGYPRTFGGGTKVEIK |
| | LC CDR1 | 545 | KSSQSLLYSGNQKNYLA |
| | LC CDR2 | 546 | WASTRES |
| | LC CDR3 | 547 | QQYYGYPRT |
| | Linker 4 | 3307 | GGGGS |
| | VH 4 | 580 | EVQLQQSGAELVRPGALVKLSCKTSGFNIKDYFLHWVRQRPDQ |
| | | | GLEWIGWINPDNGNTVYDPKFQGTASLTADTSSNTVYLQLSGLT |
| | | | SEDTAVYFCTRRDYTYEKAALDYWGQGASVIVSS |
| | HC CDR1 | 581 | GFNIKDYFLH |
| | HC CDR2 | 582 | WINPDNGNTVYDPKFQG |
| | HC CDR3 | 583 | RDYTYEKAALDY |
| | Heavy | 589 | AKTTAPSVYPLAPVSGDTTGSSVTLGCLVKGYFPEPVTLTWNSG |
| | Chain | | SLSSGVHTFPAVLQSDLYTLSSSVTVTSSTWPSQSITCNVAHPAS |
| | Constant | | STKVDKKIEPKSCDKTHTCPPCPAPNAAGGPSVFIFPPKIKDVLMI |
| | Region | | SLSPIVTCVVVDVSEDDPDVQISWFVNNVEVHTAQTQTHREDY |
| | | | NSTLRVVSALPIQHQDWMSGKEFKCKVNNKDLGAPIERTISKPK |
| | | | GSVRAPQVYVLPPPEEEMTKKQVTLTCMVTDFMPEDIYVEWTN |
| | | | NGKTELNYKNTEPVLDSDGSYFMYSKLRVEKKNWVERNSYSCS |
| | | | VVHEGLHNHHTTKSFSRTPGK |
| | CH1 | 572 | AKTTAPSVYPLAPVSGDTTGSSVTLGCLVKGYFPEPVTLTWNSG |
| | | | SLSSGVHTFPAVLQSDLYTLSSSVTVTSSTWPSQSITCNVAHPAS |
| | | | STKVDKKIEPKSC |
| | Fc (CH2- | 566 | DKTHTCPPCPAPNAAGGPSVFIFPPKIKDVLMISLSPIVTCVVVDV |
| | CH3) region | | SEDDPDVQISWFVNNVEVHTAQTQTHREDYNSTLRVVSALPIQH |
| | | | QDWMSGKEFKCKVNNKDLGAPIERTISKPKGSVRAPQVYVLPPP |
| | | | EEEMTKKQVTLTCMVTDFMPEDIYVEWTNNGKTELNYKNTEP |
| | | | VLDSDGSYFMYSKLRVEKKNWVERNSYSCSVVHEGLHNHHTT |
| | | | KSFSRTPGK |
| Polypeptide | Full | 520 | AIQMSQSPASLSASVGETVTITCRASGNIYNYLAWYQQKQGKSP |
| Chain 4 | Sequence | | HLLVYDAKTLADGVPSRFSGSGSGTQYSLKISSLQTEDSGNYYC |
| | | | QHFWSLPFTFGSGTKLEIKRADAAPTVSIFPPSSEQLTSGGASVV |
| | | | CFLNNFYPKDINVKWKIDGSERQNGVLNSWTDQDSKDSTYSMS |
| | | | STLTLTKDEYERHNSYTCEATHKTSTSPIVKSFNRNEC |
| | VL 4 | 585 | AIQMSQSPASLSASVGETVTITCRASGNIYNYLAWYQQKQGKSP |
| | | | HLLVYDAKTLADGVPSRFSGSGSGTQYSLKISSLQTEDSGNYYC |
| | | | QHFWSLPFTFGSGTKLEIK |
| | LC CDR1 | 586 | RASGNIYNYLA |
| | LC CDR2 | 587 | DAKTLAD |
| | LC CDR3 | 588 | QHFWSLPFT |
| | Light Chain | 3528 | RADAAPTVSIFPPSSEQLTSGGASVVCFLNNFYPKDINVKWKIDG |
| | Constant | | SERQNGVLNSWTDQDSKDSTYSMSSTLTLTKDEYERHNSYTCE |
| | Region | | ATHKTSTSPIVKSFNRNEC |

BNM0092

| | | | |
|---|---|---|---|
| Polypeptide | Full | 515 | EVQLVESGGGLVQPGKSLKLSCEASGFTFSGYGMHWVRQAPGR |
| Chain 1 | Sequence | | GLESVAYITSSSINIKYADAVKGRFTVSRDNAKNLLFLQMNILKS |
| Hole | | | EDTAMYYCARFDWDKNYWGQGTMVTVSSAKTTAPSVYPLAP |
| | | | VSGDTTGSSVTLGCLVKGYFPEPVTLTWNSGSLSSGVHTFPAVL |
| | | | QSDLYTLSSSVTVTSSTWPSQSITCNVAHPASSTKVDKKIEPKSC |
| | | | DKTHTCPPCPAPNAAGGPSVFIFPPKIKDVLMISLSPIVTCVVVDV |
| | | | SEDDPDVQISWFVNNVEVHTAQTQTHREDYNSTLRVVSALPIQH |
| | | | QDWMSGKEFKCKVNNKDLGAPIERTISKPKGSVRAPQVYVLPPP |
| | | | EEEMTKKQVTLTCMVTDFMPEDIYVEWTNNGKTELNYKNTEP |
| | | | VLDSDGSYLMYSKLTVEKKNWVERNSYSCSVVHEGLHNHHTT |
| | | | KSFSRTPGK |
| | VH 1 | 567 | EVQLVESGGGLVQPGKSLKLSCEASGFTFSGYGMHWVRQAPGR |
| | | | GLESVAYITSSSINIKYADAVKGRFTVSRDNAKNLLFLQMNILKS |
| | | | EDTAMYYCARFDWDKNYWGQGTMVTVSS |
| | HC CDR1 | 568 | GFTFSGYGMH |
| | HC CDR2 | 569 | YITSSSINIKYADAVKG |
| | HC CDR3 | 570 | FDWDKNY |
| | Heavy | 571 | AKTTAPSVYPLAPVSGDTTGSSVTLGCLVKGYFPEPVTLTWNSG |
| | Chain | | SLSSGVHTFPAVLQSDLYTLSSSVTVTSSTWPSQSITCNVAHPAS |
| | Constant | | STKVDKKIEPKSCDKTHTCPPCPAPNAAGGPSVFIFPPKIKDVLMI |
| | Region | | SLSPIVTCVVVDVSEDDPDVQISWFVNNVEVHTAQTQTHREDY |
| | Hole | | NSTLRVVSALPIQHQDWMSGKEFKCKVNNKDLGAPIERTISKPK |
| | | | GSVRAPQVYVLPPPEEEMTKKQVTLTCMVTDFMPEDIYVEWTN |
| | | | NGKTELNYKNTEPVLDSDGSYLMYSKLTVEKKNWVERNSYSCS |
| | | | VVHEGLHNHHTTKSFSRTPGK |
| | CH1 | 572 | AKTTAPSVYPLAPVSGDTTGSSVTLGCLVKGYFPEPVTLTWNSG |
| | | | SLSSGVHTFPAVLQSDLYTLSSSVTVTSSTWPSQSITCNVAHPAS |
| | | | STKVDKKIEPKSC |
| | Fc (CH2- | 573 | DKTHTCPPCPAPNAAGQPSVFIFPPKIKDVLMISLSPIVTCVVVDV |
| | CH3) region | | SEDDPDVQISWFVNNVEVHTAQTQTHREDYNSTLRVVSALPIQH |
| | Hole | | QDWMSGKEFKCKVNNKDLGAPIERTISKPKGSVRAPQVYVLPPP |
| | | | EEEMTKKQVTLTCMVTDFMPEDIYVEWTNNGKTELNYKNTEP |
| | | | VLDSDGSYLMYSKLTVEKKNWVERNSYSCSVVHEGLHNHHTT |
| | | | KSFSRTPGK |
| Polypeptide | Full | 516 | DIQMTQSPSSLPASLGDRVTINCQASQDISNYLNWYQQKPGKAP |
| Chain 3 | Sequence | | KLLIYYTNKLADGVPSRFSGSGSGRDSSFTISSLESEDIGSYYCQQ |
| | | | YYNYPWTFGPGTKLEIKRADAAPTVSIFPPSSEQLTSGGASVVCF |
| | | | LNNFYPKDINVKWKIDGSERQNGVLNSWTDQDSKDSTYSMSST |
| | | | LTLTKDEYERHNSYTCEATHKTSTSPIVKSFNRNEC |
| | VL 1 | 574 | DIQMTQSPSSLPASLGDRVTINCQASQDISNYLNWYQQKPGKAP |
| | | | KLLIYYTNKLADGVPSRFSGSGSGRDSSFTISSLESEDIGSYYCQQ |
| | | | YYNYPWTFGPGTKLEIK |
| | LC CDR1 | 575 | QASQDISNYLN |
| | LC CDR2 | 576 | YTNKLAD |
| | LC CDR3 | 577 | QQYYNYPWT |
| | Light Chain | 3528 | RADAAPTVSIFPPSSEQLTSGGASVVCFLNNFYPKDINVKWKIDG |
| | Constant | | SERQNGVLNSWTDQDSKDSTYSMSSTLTLTKDEYERHNSYTCE |
| | Region | | ATHKTSTSPIVKSFNRNEC |
| Polypeptide | Full | 522 | EVQLQQSGAELVRPGALVKLSCKTSGFNIKDYFLHWVRQRPDQ |
| Chain 2 | Sequence | | GLEWIGWINPDNGNTVYDPKFQGTASLTADTSSNTVYLQLSGLT |
| Knob | | | SEDTAVYFCTRRDYTYEKAALDYWGQGASVIVSSAKTTAPSVY |
| | | | PLAPVSGDTTGSSVTLGCLVKGYFPEPVTLTWNSGSLSSGVHTFP |
| | | | AVLQSDLYTLSSSVTVTSSTWPSQSITCNVAHPASSTKVDKKIEP |
| | | | KSCDKTHTCPPCPAPNAAGGPSVFIFPPKIKDVLMISLSPIVTCVV |
| | | | VDVSEDDPDVQISWFVNNVEVHTAQTQTHREDYNSTLRVVSAL |
| | | | PIQHQDWMSGKEFKCKVNNKDLGAPIERTISKPKGSVRAPQVY |
| | | | VLPPPEEEMTKKQVTLTCMVKDFMPEDIYVEWTNNGKTELNYK |
| | | | NTEPVLDSDGSYFMYSRLRVEKKNWVERNSYSCSVVHEGLHNH |
| | | | HTTKSFSRTPGK |
| | VH 2 | 580 | EVQLQQSGAELVRPGALVKLSCKTSGFNIKDYFLHWVRQRPDQ |
| | | | GLEWIGWINPDNGNTVYDPKFQGTASLTADTSSNTVYLQLSGLT |
| | | | SEDTAVYFCTRRDYTYEKAALDYWGQGASVIVSS |
| | HC CDR1 | 581 | GFNIKDYFLH |
| | HC CDR2 | 582 | WINPDNGNTVYDPKFQG |
| | HC CDR3 | 583 | RDYTYEKAALDY |
| | Heavy | 3802 | AKTTAPSVYPLAPVSGDTTGSSVTLGCLVKGYFPEPVTLTWNSG |
| | Chain | | SLSSGVHTFPAVLQSDLYTLSSSVTVTSSTWPSQSITCNVAHPAS |
| | Constant | | STKVDKKIEPKSCDKTHTCPPCPAPNAAGGPSVFIFPPKIKDVLMI |
| | Region | | SLSPIVTCVVVDVSEDDPDVQISWFVNNVEVHTAQTQTHREDY |
| | Knob | | NSTLRVVSALPIQHQDWMSGKEFKCKVNNKDLGAPIERTISKPK |
| | | | GSVRAPQVYVLPPPEEEMTKKQVTLTCMVKDFMPEDIYVEWTN |
| | | | NGKTELNYKNTEPVLDSDGSYFMYSRLRVEKKNWVERNSYSCS |
| | | | VVHEGLHNHHTTKSFSRTPGK |
| | CH1 | 572 | AKTTAPSVYPLAPVSGDTTGSSVTLGCLVKGYFPEPVTLTWNSG |
| | | | SLSSGVHTFPAVLQSDLYTLSSSVTVTSSTWPSQSITCNVAHPAS |
| | | | STKVDKKIEPKSC |
| | Fc (CH2- | 579 | DKTHTCPPCPAPNAAGGPSVFIFPPKIKDVLMISLSPIVTCVVVDV |
| | CH3) region | | SEDDPDVQISWFVNNVEVHTAQTQTHREDYNSTLRVVSALPIQH |
| | Knob | | QDWMSGKEFKCKVNNKDLGAPIERTISKPKGSVRAPQVYVLPPP |
| | | | EEEMTKKQVTLTCMVKDFMPEDIYVEWTNNGKTELNYKNTEP |
| | | | VLDSDGSYFMYSRLRVEKKNWVERNSYSCSVVHEGLHNHHTT |
| | | | KSFSRTPGK |
| Polypeptide | Full | 520 | AIQMSQSPASLSASVGETVTITCRASGNIYNYLAWYQQKQGKSP |
| Chain 4 | Sequence | | HLLVYDAKTLADGVPSRFSGSGSGTQYSLKISSLQTEDSGNYYC |
| | | | QHFWSLPFTFGSGTKLEIKRADAAPTVSIFPPSSEQLTSGGASVV |
| | | | CFLNNFYPKDINVKWKIDGSERQNGVLNSWTDQDSKDSTYSMS |
| | | | STLTLTKDEYERHNSYTCEATHKTSTSPIVKSFNRNEC |
| | VL 2 | 585 | AIQMSQSPASLSASVGETVTITCRASGNIYNYLAWYQQKQGKSP |
| | | | HLLVYDAKTLADGVPSRFSGSGSGTQYSLKISSLQTEDSGNYYC |
| | | | QHFWSLPFTFGSGTKLEIK |
| | LC CDR1 | 586 | RASGNIYNYLA |
| | LC CDR2 | 587 | DAKTLAD |
| | LC CDR3 | 588 | QHFWSLPFT |
| | Light Chain | 3528 | RADAAPTVSIFPPSSEQLTSGGASVVCFLNNFYPKDINVKWKIDG |
| | Constant | | SERQNGVLNSWTDQDSKDSTYSMSSTLTLTKDEYERHNSYTCE |
| | Region | | ATHKTSTSPIVKSFNRNEC |

### Exemplary Embodiments

[1412] In some embodiments, binding of the multifunctional polypeptide molecule as described herein to the TCRβV region results in a cytokine profile that differs from a cytokine profile of a T cell engager that binds to a receptor or molecule other than a TCRβV region (non-TCRβV-binding T cell engager). IN some embodiments, the non-TCRβV-binding T cell engager comprises an antibody that binds to a CD3 molecule (e.g., CD3 epsilon (CD3e) molecule); or a TCR alpha (TCRa) molecule.

[1413] In some embodiments, the multifunctional polypeptide molecule as described herein further comprises one or more of: a tumor-targeting moiety, a cytokine molecule, a stromal modifying moiety, or an anti-TCRβV antibody molecule other than the first moiety.

[1414] In some embodiments, the cytokine profile resulted in by binding of the multifunctional polypeptide molecule as described herein to the TCRβV region comprises, one, two, three, four, five, six, seven, or all of the following: (i) increased level, e.g., expression level, and/or activity of IL-2; (ii) reduced level, e.g., expression level, and/or activity of IL-1β; (iii) reduced level, e.g., expression level, and/or activity of IL-6; (iv) reduced level, e.g., expression level, and/or activity of TNFα; (v) reduced level, e.g., expression level, and/or activity of IL-10; (vi) a delay, e.g., at least 1, 2, 3, 4, 5, 6, 7, 8, 9, 10 or more hours delay, in increased level, e.g., expression level, and/or activity of IL-2; (vii) a delay, e.g., at least 1, 2, 3, 4, 5, 6, 7, 8, 9, 10 hours delay, in increased level, e.g., expression level, and/or activity of IFNg; or (viii) increased level, e.g., expression level, and/or activity of IL-15, e.g., wherein (i)-(viii) are relative to the cytokine profile of the non-TCRβV-binding T cell engager.

[1415] In some embodiments, binding of the multifunctional polypeptide molecule as described herein to the TCRβV region results in reduced cytokine storm, e.g., reduced cytokine release syndrome (CRS), as measured by an assay of Example 3, e.g., relative to the cytokine storm induced by the non-TCRβV-binding T cell engager.

[1416] In some embodiments, binding of the multifunctional polypeptide molecule as described herein to the TCRβV region results in one, two, three or all of: (i) reduced T cell proliferation kinetics; (ii) cell killing, e.g., target cell killing, e.g. cancer cell killing, e.g., as measured by an assay of Example 4; (iii) increased Natural Killer (NK) cell proliferation, e.g., expansion; or (vi) expansion, e.g., at least about 1.1-10 fold expansion (e.g., at least about 1.1, 1.2, 1.3, 1.4, 1.5, 2, 3, 4, 5, 6, 7, 8, 9, or 10 fold expansion), of a population of T cells having a memory-like phenotype, e.g., wherein (ix)-(xii) are relative to the non-TCRβV-binding T cell engager. In some embodiments, the population of T cells having a memory-like phenotype comprises CD45RA+ CCR7− T cells, e.g., CD4+ and/or CD8+ T cells.

[1417] In some embodiments, the multifunctional polypeptide molecule as described herein binds to one or more of a TCRβV subfamily chosen from: (i) TCRβ V6 subfamily comprising, e.g., one or more of TCRB V6-4*01, TCRβ V6-4*02, TCRβ V6-9*01, TCRβ V6-8*01, TCRβ V6-5*01, TCRβ V6-6*02, TCRβ V6-6*01, TCRβ V6-2*01, TCRβ V6-3*01 or TCRβ V6-1*01; (ii) TCRβ V10 subfamily comprising, e.g., one or more of TCRβ V10-1*01, TCRβ V10-1*02, TCRβ V10-3*01 or TCRβ V10-2*01; (iii) TCRβ V5 subfamily comprising, e.g., one or more of TCRβ V5-6*01, TCRβ V5-4*01, TCRβ V5-1*01 or TCRβ V5-8*01; (iv) TCRβ V12 subfamily comprising, e.g., one or more of TCRβ V12-4*01, TCRβ V12-3*01, or TCRβ V12-5*01; (v) TCRβ V27 subfamily; (vi) TCRβ V28 subfamily; (vii) TCRβ V4 subfamily comprising, e.g., one or more of TCRβ V4-1, TCRβ V4-2 or TCRβ V4-3; (viii) TCRβ V19 subfamily; (ix) TCRβ V9 subfamily; or (x) TCRβ V11 subfamily comprising, e.g., TCRβ V11-2.

[1418] In some embodiments, the multifunctional polypeptide molecule as described herein comprises the anti-TCRβV antibody molecule: (i) binds specifically to an epitope on TCRβV, e.g., the same or similar epitope as the epitope recognized by an anti-TCRβV antibody molecule as described herein, e.g., a second anti-TCRβV antibody molecule; (ii) shows the same or similar binding affinity or specificity, or both, as an anti-TCRβV antibody molecule as described herein, e.g., a second anti-TCRβV antibody molecule; (iii) inhibits, e.g., competitively inhibits, the binding of an anti-TCRβV antibody molecule as described herein, e.g., a second anti-TCRβV antibody molecule; or (iv) binds the same or an overlapping epitope with an anti-TCRβV antibody molecule as described herein, e.g., a second anti-TCRβV antibody molecule.

[1419] In some embodiments, the multifunctional polypeptide molecule as described herein comprises an antibody molecule chosen from a bispecific antibody molecule, a bivalent antibody molecule, or a biparatopic antibody molecule.

[1420] In some embodiments, the multifunctional polypeptide molecule as described herein comprises a bispecific antibody molecule that binds to two different TCRβV subfamily members.

[1421] In some embodiments, the multifunctional polypeptide molecule as described herein comprises an anti-TCRβV antibody molecule comprising a heavy chain comprising a framework region, e.g., framework region 3 (FR3), comprising one or both of: (i) a Threonine at position 73, e.g., a substitution at position 73 according to Kabat numbering, e.g., a Glutamic Acid to Threonine substitution; or (ii) a Glycine a position 94. e.g., a substitution at position 94 according to Kabat numbering, e.g., a Arginine to Glycine substitution; wherein the substitution is relative to a human germline heavy chain framework region sequence.

[1422] In some embodiments, the multifunctional polypeptide molecule as described herein comprises an anti-TCRβV antibody molecule comprises a light chain comprising a framework region, e.g., framework region 1 (FR1), comprising a Phenylalanine at position 10, e.g., a substitution at position 10 according to Kabat numbering, e.g., a Serine to Phenylalanine substitution, wherein the substitution is relative to a human germline light chain framework region sequence.

[1423] In some embodiments, the multifunctional polypeptide molecule as described herein comprises an anti-TCRβV antibody molecule comprises a light chain comprising a framework region, e.g., framework region 2 (FR2), comprising one or both of (i) a Histidine at position 36, e.g., a substitution at position 36 according to Kabat numbering, e.g., a Tyrosine to Histidine substitution; or (ii) an Alanine at position 46, e.g., a substitution at position 46 according to Kabat numbering, e.g., a Arginine to Alanine substitution; wherein the substitution is relative to a human germline light chain framework region sequence.

[1424] In some embodiments, the multifunctional polypeptide molecule as described herein comprises an anti-TCRβV antibody molecule comprises a light chain comprising a framework region, e.g., framework region 3 (FR3), comprising a Phenylalanine at position 87, e.g., a substitution at position 87 according to Kabat numbering, e.g., a Tyrosine to Phenylalanine substitution, wherein the substitution is relative to a human germline light chain framework region sequence.

[1425] In some embodiments, the multifunctional polypeptide molecule as described herein comprises an anti-TCRβV antibody molecule comprises an antigen binding domain comprising: (a) a light chain variable region (VL) comprising: (i) one, two or all of (e.g., three) a light chain complementarity determining region 1 (LC CDR1), a light chain complementarity determining region 2 (LC CDR2), and a light chain complementarity determining region 3 (LC CDR3) of a humanized B-H light chain (LC) of Table 2; and (ii) a framework region (FR) having at least 95% sequence identity with one, two, three or all (e.g., four) of a framework region 1 (FR1), a framework region 2 (FR2), a framework region 3 (FR3), and a framework region 4 (FR4) of a humanized B-H LC of Table 2; and/or (b) a heavy chain variable region (VH) comprising: (i) one, two or all of (e.g., three) a heavy chain complementarity determining region 1 (HC CDR1), a heavy chain complementarity determining region 2 (HC CDR2) and a heavy chain complementarity determining region 3 (HC CDR3) of a humanized B-H heavy chain (HC) of Table 2; and (ii) a framework region (FR) having at least 95% sequence identity with one, two, three or all (e.g., four) of a framework region 1 (FR1), a framework region 2 (FR2), a framework region 3 (FR3), and a framework region 4 (FR4) of a humanized B-H HC of Table 2.

[1426] In some embodiments, the multifunctional polypeptide molecule as described herein comprises an anti-TCRβV antibody molecule comprising an antigen binding domain comprising: (i) a HC CDR1, a HC CDR2 and a HC CDR3 of Antibody B-H listed in Table 2; or (ii) a LC CDR1, a LC CDR2, and a LC CDR3 of Antibody B-H listed in Table 2.

[1427] In some embodiments, the multifunctional polypeptide molecule as described herein comprises an anti-TCRβV antibody molecule comprising an antigen binding domain comprising a heavy chain variable region (VH) comprising one, two or all (e.g., three) of a HC CDR1, a HC CDR2 and a HC CDR3 of a humanized Antibody B-H listed in Table 2.

[1428] In some embodiments, the multifunctional polypeptide molecule as described herein comprises an anti-TCRβV antibody molecule comprising an antigen binding domain comprising a light chain variable region (VL) comprising one, two or all (e.g., three) of a LC CDR1, a LC CDR2 and a LC CDR3 of a humanized Antibody B-H listed in Table 2.

[1429] In some embodiments, the multifunctional polypeptide molecule as described herein comprises an anti-TCRβV antibody molecule comprising: a VH sequence of a humanized Antibody B-H listed in Table 2, or a sequence having at least about 75%, 80%, 85%, 90%, 95%, 99%, 99.5%, 99.7%, 99.9%, or 100% sequence identity to a VH of a humanized Antibody B-H listed in Table 2; and/or a VL sequence of a humanized Antibody B-H listed in Table 2, or a sequence having at least about 75%, 80%, 85%, 90%, 95%, 99%, 99.5%, 99.7%, 99.9%, or 100% sequence identity to a VL of a humanized Antibody B-H listed in Table 2.

[1430] In some embodiments, the multifunctional polypeptide molecule as described herein comprises an anti-TCRβV antibody molecule comprising a framework region (FR) having at least 75%, 80%, 85%, 90%, 95%, 99%, 99.5%, 99.7%, 99.9%, or 100% sequence identity with one of: a FR1, a FR2, a FR3, and a FR4 of a humanized B-H LC of Table 2.

[1431] In some embodiments, the multifunctional polypeptide molecule as described herein comprises an anti-TCRβV antibody molecule comprising a framework region (FR) having at least 75%, 80%, 85%, 90%, 95%, 99%, 99.5%, 99.7%, 99.9%, or 100% sequence identity with any two of: a FR1, a FR2, a FR3, and a FR4 of a humanized B-H LC of Table 2.

[1432] In some embodiments, the multifunctional polypeptide molecule as described herein comprises an anti-TCRβV antibody molecule comprising a framework region (FR) having at least 75%, 80%, 85%, 90%, 95%, 99%, 99.5%, 99.7%, 99.9%, or 100% sequence identity with any three of: a FR1, a FR2, a FR3, and a FR4 of a humanized B-H LC of Table 2.

[1433] In some embodiments, the multifunctional polypeptide molecule as described herein comprises an anti-TCRβV antibody molecule comprises a framework region (FR) having at least 75%, 80%, 85%, 90%, 95%, 99%, 99.5%, 99.7%, 99.9%, or 100% sequence identity with all of, a FR1, a FR2, a FR3, and a FR4 of a humanized B-H LC of Table 2.

[1434] In some embodiments, the multifunctional polypeptide molecule as described herein comprises an anti-TCRβV antibody molecule comprises a framework region (FR) having at least 75%, 80%, 85%, 90%, 95%, 99%, 99.5%, 99.7%, 99.9%, or 100% sequence identity with one of: a FR1, a FR2, a FR3, and a FR4 of a humanized B-H HC of Table 2.

[1435] In some embodiments, the multifunctional polypeptide molecule as described herein comprises an anti-TCRβV antibody molecule comprises a framework region (FR) having at least 75%, 80%, 85%, 90%, 95%, 99%, 99.5%, 99.7%, 99.9%, or 100% sequence identity with any two of: a FR1, a FR2, a FR3, and a FR4 of a humanized B-H HC of Table 2.

[1436] In some embodiments, the multifunctional polypeptide molecule as described herein comprises an anti-TCRβV antibody molecule comprises a framework region (FR) having at least 75%, 80%, 85%, 90%, 95%, 99%, 99.5%, 99.7%, 99.9%, or 100% sequence identity with any three of: a FR1, a FR2, a FR3, and a FR4 of a humanized B-H HC of Table 2.

[1437] In some embodiments, the multifunctional polypeptide molecule as described herein comprises an anti-TCRβV antibody molecule comprises a framework region (FR) having at least 75%, 80%, 85%, 90%, 95%, 99%, 99.5%, 99.7%, 99.9%, or 100% sequence identity with all of: a FR1, a FR2, a FR3, and a FR4 of a humanized B-H HC of Table 2.

[1438] In some embodiments, binding of the multifunctional polypeptide molecule as described herein to a TCRβV region results in a reduction of at least 2, 3, 4, 5, 6, 7, 8, 9, 10, 20, 30, 40, 50, 60, 70, 80, 90, 100, 200, 300, 400, 500, 600, 700, 800, 900, 1000, 1500, 2000, 2500, 3000, 3500, 4000, 4500, 5000, 5500, 6000, 6500, 7000, 7500, 8000, 8500, 9000, 9500, or 10000 fold, or at least 2-10000 fold in the expression level and or activity of IL-1β as measured by an assay of Example 3.

[1439] In some embodiments, binding of the multifunctional polypeptide molecule as described herein to a TCRβV region results in a reduction of at least 2, 3, 4, 5, 6, 7, 8, 9, 10, 20, 30, 40, 50, 60, 70, 80, 90, 100, 200, 300, 400, 500, 600, 700, 800, 900, 1000, 1500, 2000, 2500, 3000, 3500, 4000, 4500, 5000, 5500, 6000, 6500, 7000, 7500, 8000, 8500, 9000, 9500, or 10000 fold, or at least 2-10000 fold in the expression level and or activity of IL-6 as measured by an assay of Example 3.

[1440] In some embodiments, binding of the multifunctional polypeptide molecule as described herein to a TCRβV region results in a reduction of at least 2, 3, 4, 5, 6, 7, 8, 9, 10, 20, 30, 40, 50, 60, 70, 80, 90, 100, 200, 300, 400, 500, 600, 700, 800, 900, 1000, 1500, 2000, 2500, 3000, 3500, 4000, 4500, 5000, 5500, 6000, 6500, 7000, 7500, 8000, 8500, 9000, 9500, or 10000 fold, or at least 2-10000 fold in the expression level and or activity of TNFα as measured by an assay of Example 3.

[1441] In some embodiments, binding of the multifunctional polypeptide molecule as described herein to a TCRβV region results in a reduction of at least 2, 3, 4, 5, 6, 7, 8, 9, 10, 20, 30, 40, 50, 60, 70, 80, 90, 100, 200, 300, 400, 500, 600, 700, 800, 900, 1000, 1500, 2000, 2500, 3000, 3500, 4000, 4500, 5000, 5500, 6000, 6500, 7000, 7500, 8000, 8500, 9000, 9500, or 10000 fold, or at least 2-10000 fold in the expression level and or activity of IL-2 as measured by an assay of Example 3.

[1442] In some embodiments, the multifunctional polypeptide molecule as described herein comprises an anti-TCRβV antibody molecule that binds to a conformational or a linear epitope on the T cell.

[1443] In some embodiments, the multifunctional polypeptide molecule as described herein comprises an anti-TCRβV antibody molecule that is a full antibody (e.g., an antibody that includes at least one, and preferably two, complete heavy chains, and at least one, and preferably two, complete light chains), or an antigen-binding fragment (e.g., a Fab, F(ab′)2, Fv, a single chain Fv fragment, a single domain antibody, a diabody (dAb), a bivalent antibody, or bispecific antibody or fragment thereof, a single domain variant thereof, or a camelid antibody).

[1444] In some embodiments, the multifunctional polypeptide molecule as described herein comprises an anti-TCRβV antibody molecule that comprises one or more heavy chain constant regions chosen from IgG1, IgG2, IgG3, IgGA1, IgGA2, IgG4, IgJ, IgM, IgD, or IgE, or a fragment thereof, e.g., as described in Table 3, 21, or 22.

[1445] In some embodiments, the multifunctional polypeptide molecule as described herein comprises an anti-TCRβV antibody molecule that comprises a heavy chain constant region of an IgM or a fragment thereof, optionally wherein the IgM heavy chain constant region comprises the sequence of SEQ ID NO: 73, or a sequence with at least 75%, 80%, 85%, 90%, 95%, 99%, 99.5%, 99.7%, 99.9%, or 100% sequence identity thereto.

[1446] In some embodiments, the multifunctional polypeptide molecule as described herein comprises an anti-TCRβV antibody molecule that comprises a heavy chain constant region of an IgJ or a fragment thereof, optionally wherein the IgJ heavy chain constant region comprises the sequence of SEQ ID NO: 76 or a sequence with at least 75%, 80%, 85%, 90%, 95%, 99%, 99.5%, 99.7%, 99.9%, or 100% sequence identity thereto.

[1447] In some embodiments, the multifunctional polypeptide molecule as described herein comprises an anti-TCRβV antibody molecule that comprises a heavy chain constant region of an IgGA1, or a fragment thereof, optionally wherein the IgGA1 heavy chain constant region comprises the sequence of SEQ ID NO: 74, or a sequence at least 75%, 80%, 85%, 90%, 95%, 99%, 99.5%, 99.7%, 99.9%, or 100% sequence identity thereto.

[1448] In some embodiments, the multifunctional polypeptide molecule as described herein comprises an anti-TCRβV antibody molecule that comprises a heavy chain constant region of an IgGA2, or a fragment thereof, optionally wherein the IgGA2 heavy chain constant region comprises a sequence listed in Table 3, 21, or 22, e.g., SEQ ID NO: 75, or a sequence with at least 75%, 80%, 85%, 90%, 95%, 99%, 99.5%, 99.7%, 99.9%, or 100% sequence identity thereto.

[1449] In some embodiments, the multifunctional polypeptide molecule as described herein comprises an anti-TCRβV antibody molecule that comprises a light chain constant region chosen from the light chain constant regions of kappa or lambda, or a fragment thereof, e.g., as described in Table 3, 21, or 22.

[1450] In some embodiments, the multifunctional polypeptide molecule as described herein comprises an anti-TCRβV antibody molecule that comprises a light chain constant region of a kappa chain, or a fragment thereof, optionally wherein the kappa chain constant region comprises the sequence of SEQ ID NO: 39, or a sequence with at least 75%, 80%, 85%, 90%, 95%, 99%, 99.5%, 99.7%, 99.9%, or 100% sequence identity thereto.

[1451] In some embodiments, the multifunctional polypeptide molecule as described herein comprises an anti-TCRβV antibody molecule that comprises: (i) one or more heavy chain constant regions comprising a heavy chain constant region chosen from IgG1. IgG2, IgG3, IgGA1, IgGA2, IgG4, IgJ, IgM, IgD, or IgE, or a fragment thereof, e.g., as described in Table 3, 21, or 22; and (ii) a light chain constant region comprising a light chain constant region chosen from the light chain constant regions of kappa or lambda, or a fragment thereof, e.g., as described in Table 3, 21, or 22.

[1452] In some embodiments, the multifunctional polypeptide molecule as described herein binds to and activates an immune cell, e.g., an effector cell.

[1453] In some embodiments, the multifunctional polypeptide molecule as described herein binds to, but does not activate an immune cell, e.g., an effector cell.

[1454] In some embodiments, the multifunctional polypeptide molecule as described herein further comprises an NK cell engager, a T cell engager other than an anti-TCRβV antibody molecule, a B cell engager, a dendritic cell engager, or a macrophage cell engager, or a combination thereof.

[1455] In some embodiments, the multifunctional polypeptide molecule as described herein further comprises a tumor-targeting moiety that binds to a cancer antigen present on a cancer, e.g., a hematological cancer, a solid tumor, a metastatic cancer, soft tissue tumor, metastatic lesion, or a combination thereof.

[1456] In some embodiments, the cancer antigen is a tumor antigen or stromal antigen, or a hematological antigen.

[1457] In some embodiments, the cancer antigen is selected from: BCMA, CD19, CD20, CD22, FcRH5, PDL1, CD47, gangloside 2 (GD2), prostate stem cell antigen (PSCA), prostate specific membrane antigen (PMSA), prostate-specific antigen (PSA), carcinoembryonic antigen (CEA), Ron Kinase, c-Met, Immature laminin receptor, TAG-72, BING-4, Calcium-activated chloride channel 2, Cyclin-B1, 9D7, Ep-CAM, EphA3, Her2/neu. Telomerase, SAP-1, Survivin, NY-ESO-1/LAGE-1, PRAME. SSX-2, Melan-A/MART-1, Gp100/pmel17, Tyrosinase, TRP-1/-2, MC1R, β-catenin, BRCA1/2, CDK4, CML66, Fibronectin, p53, Ras, TGF-B receptor, AFP, ETA, MAGE, MUC-J, CA-125, BAGE, GAGE, NY-ESO-1, β-catenin, CDK4, CDC27, a actinin-4, TRP 1/gp75, TRP2, gp100, Melan-A/MARTI, gangliosides, WT1, EphA3, Epidermal growth factor receptor (EGFR), MART-2, MART-1, MUC1, MUC2, MUM1, MUM2, MUM3, NA88-1, NPM, OA1, OGT, RCC, RUI1, RUI2, SAGE, TRG, TRP1, TSTA, Folate receptor alpha, L1-CAM, CAIX, gpA33, GD3, GM2, VEGFR, Integrins (Integrin alphaVbeta3, Integrin alpha5Beta1). Carbohydrates (Le), IGF1R, EPHA3, TRAILR1, TRAILR2, RANKL, (FAP), TGF-beta, hyaluronic acid, collagen, e.g., collagen IV, tenascin C, and tenascin W. \

[1458] In some embodiments, the tumor-associated antigen binding moiety is a BCMA targeting moiety or a FcRH5 targeting moiety.

[1459] In some embodiments, the cancer is a solid tumor including but not limited to: pancreatic (e.g., pancreatic adenocarcinoma) cancer, breast cancer, colorectal cancer, lung cancer (e.g., small or non-small cell lung cancer), skin cancer, ovarian cancer, or liver cancer.

[1460] In some embodiments, the cancer is a hematological cancer including, but not limited to: a B-cell or T cell malignancy, e.g., Hodgkin's lymphoma, Non-Hodgkin's lymphoma (e.g., B cell lymphoma, diffuse large B cell lymphoma, follicular lymphoma, chronic lymphocytic leukemia, mantle cell lymphoma, marginal zone B-cell lymphoma, Burkitt lymphoma, lymphoplasmacytic lymphoma, hairy cell leukemia), acute myeloid leukemia (AML), chronic myeloid leukemia, myelodysplastic syndrome, multiple myeloma, and acute lymphocytic leukemia.

[1461] In some embodiments, the cytokine molecule is chosen from interleukin-2 (IL-2), interleukin-7 (IL-7), interleukin-12 (IL-12), interleukin-15 (IL-15), interleukin-18 (IL-18), interleukin-21 (IL-21), or interferon gamma, or a fragment, variant or a combination thereof.

[1462] In some embodiments, the cytokine molecule is a monomer or a dimer.

[1463] In some embodiments, the cytokine molecule further comprises a receptor dimerizing domain, e.g., an IL15Ralpha dimerizing domain.

[1464] In some embodiments, the cytokine molecule (e.g., IL-15) and the receptor dimerizing domain (e.g., an IL15Ralpha dimerizing domain) are not covalently linked, e.g., are non-covalently associated.

[1465] In some embodiments, the multifunctional polypeptide molecule as described herein further comprises an immunoglobulin constant region (e.g., Fc region) chosen from the heavy chain constant regions of IgG1. IgG2, IgG3, IgGA1. IgGA2. IgG4, IgJ, IgM. IgD, or lgE, or a fragment thereof, optionally wherein, the heavy chain constant region comprises the heavy chain constant region of human IgG1, IgG2 or IgG4.

[1466] In some embodiments, the immunoglobulin constant region (e.g., an Fc region) is linked, e.g., covalently linked to, one or more of tumor-targeting moiety, the cytokine molecule, or the stromal modifying moiety.

[1467] In some embodiments, an interface of a first and second immunoglobulin chain constant regions (e.g., Fc region) is altered, e.g., mutated, to increase or decrease dimerization, e.g., relative to a non-engineered interface.

[1468] In some embodiments, the dimerization of the immunoglobulin chain constant region (e.g., Fc region) is enhanced by providing an Fc interface of a first and a second Fc region with one or more of: a paired cavity-protuberance (“knob-in-a hole”), an electrostatic interaction, or a strand-exchange, such that a greater ratio of heteromultimer:homomultimer forms, e.g., relative to a non-engineered interface.

[1469] In some embodiments, the multifunctional polypeptide molecule as described herein further comprises a linker, e.g., a linker described herein, optionally wherein the linker is selected from: a cleavable linker, a non-cleavable linker, a peptide linker, a flexible linker, a rigid linker, a helical linker, or a non-helical linker.

[1470] In some embodiments, provided herein is an isolated nucleic acid molecule comprising a nucleotide sequence encoding the multifunctional polypeptide molecule as described herein, or a nucleotide sequence having at least 75%, 80%, 85%, 90%, 95%, 99%, 99.5%, 99.7%, 99.9%, or 100% sequence identity thereto.

[1471] In some embodiments, provided herein is a vector, e.g., an expression vector, comprising one or more of the nucleic acid molecules as described herein.

[1472] In some embodiments, provided herein is a cell, e.g., host cell, comprising the nucleic acid molecule as described herein or the vector of as described herein.

[1473] In some embodiments, provided herein is a method of making, e.g., producing or manufacturing, the multifunctional polypeptide molecule as described herein, comprising culturing the host cell as described herein, under suitable conditions, e.g., conditions suitable expression of the multifunctional polypeptide molecule as described herein.

[1474] In some embodiments, provided herein is a pharmaceutical composition comprising the multifunctional polypeptide molecule as described herein, and a pharmaceutically acceptable carrier, excipient, or diluent.

[1475] In some embodiments, provided herein is a method of modulating, e.g., enhancing, an immune response in a subject comprising administering to the subject an effective amount of the multifunctional polypeptide molecule as described herein. In some embodiments, the method comprises expanding, e.g., increasing the number of, an immune cell population in the subject.

[1476] In some embodiments, provided herein is a method of expanding, e.g, increasing the number of, an immune cell population comprising, contacting the immune cell population with an effective amount of the multifunctional polypeptide molecule as described herein. In some embodiments, the expansion occurs in vivo or ex vivo (e.g., in vitro).

[1477] In some embodiments, the immune cell population comprises a TCRβV expressing cell, e.g., a TCRβV+ cell.

[1478] In some embodiments, the TCRβV expressing cell is a T cell, e.g., a CD8+ T cell, a CD3+ T cell or a CD4+ T cell.

[1479] In some embodiments, the immune cell population comprises a T cell (e.g., a CD4 T cell, a CD8 T cell (e.g., an effector T cell, a T cell having a memory-like phenotype or a memory T cell (e.g., a memory effector T cell (e.g., TEM cell, e.g., TEMRA cell), or a tumor infiltrating lymphocyte (TIL).

[1480] In some embodiments, the immune cell population comprises a T cell, a Natural Killer cell, a B cell, or a myeloid cell.

[1481] In some embodiments, the immune cell population is obtained from a healthy subject.

[1482] In some embodiments, the immune cell population is obtained from a subject (e.g., from an apheresis sample from the subject) having a disease, e.g., a cancer, e.g., as described herein, optionally wherein the immune cell population comprises a tumor infiltrating lymphocyte (TIL).

[1483] In some embodiments, the method results in an expansion of at least 1.1-10 fold (e.g., at least 1.1, 1.2, 1.3, 1.4, 1.5, 2, 3, 4, 5, 6, 7, 8, 9, or 10 fold expansion).

[1484] In some embodiments, the method further comprises contacting the population of cells with an agent that promotes, e.g., increases, immune cell expansion.

[1485] In some embodiments, the method further comprises contacting the population of cells with an immune checkpoint inhibitor, e.g., a PD-1 inhibitor.

[1486] In some embodiments, the method further comprises contacting the population of cells with a 4-1BB (CD 127) agonist, e.g., an anti-4-1BB antibody.

[1487] In some embodiments, the method further comprises comprising contacting the population of cells with a non-dividing population of cells, e.g., feeder cells, e.g., irradiated allogenic human PBMCs.

[1488] In some embodiments, the population of cells is expanded in an appropriate media (e.g., media described herein) that includes one or more cytokines, e.g., IL-2, IL-7, IL-15, or a combination thereof.

[1489] In some embodiments, the population of cells is expanded for a period of at least about 4 hours, 6 hours, 10 hours. 12 hours, 15 hours, 18 hours, 20 hours, or 22 hours, or for at least 1, 2, 3, 4, 5, 6, 7, 8, 9, 10, 11, 12, 13, 14, 15, 16, 17, 18, 19, 20 or 21 days, or for at least about 1 week, 2 weeks, 3 weeks, 4 weeks, 5 weeks, 6 weeks, 7 weeks or 8 weeks.

[1490] In some embodiments, expansion of the population of immune cells, is compared to expansion of a similar population of cells with an antibody that binds to: a CD3 molecule, e.g., CD3 epsilon (CD3e) molecule; or a TCR alpha (TCRa) molecule. In some embodiments, expansion of the population of immune cells, is compared to expansion of a similar population of cells not contacted with the anti-TCRβV antibody molecule, or multispecific molecule comprising the anti-TCRβV antibody molecule.

[1491] In some embodiments, expansion of the population of T cells having a memory-like phenotype, e.g., CD45RA+ CCR7− cells (e.g., memory effector T cells, e.g., TEM cells, e.g., TEMRA cells), is compared to expansion of a similar population of cells with an antibody that binds to: a CD3 molecule, e.g., CD3 epsilon (CD3e) molecule; or a TCR alpha (TCRa) molecule.

[1492] In some embodiments, the population of expanded T cells having a memory-like phenotype, e.g., effector memory cells, comprises cells which: (i) have a detectable level of CD45RA, e.g., express or re-express CD45RA; (ii) have low or no expression of CCR7; and/or (iii) have a detectable level of CD95, e.g., express CD95, e.g., a population of CD45RA+, CCR7-, CD95+ T cells, optionally wherein the T cells comprise CD3+. CD4+ or CD8+ T cells.

[1493] In some embodiments, the method results in expansion of, e.g., selective or preferential expansion of, T cells expressing a T cell receptor (TCR) comprising a TCR alpha and/or TCR beta molecule, e.g., TCR alpha-beta T cells (αβ T cells).

[1494] In some embodiments, the method results in expansion of αβT cells over expansion of T cells expressing a TCR comprising a TCR gamma and/or TCR delta molecule, e.g., TCR gamma-delta T cells (γδ T cells).

[1495] In some embodiments, provided herein is a method of treating a disease, e.g., cancer, in a subject comprising administering to the subject an effective amount of the multifunctional polypeptide molecule as described herein.

[1496] In some embodiments, provided herein is a composition comprising the multifunctional polypeptide molecule as described herein for use in treating a disease, e.g., cancer, in a subject.

[1497] In some embodiments, provided herein is a composition comprising the multifunctional polypeptide molecule as described herein for use in the manufacture of a medicament for treating a disease, e.g., cancer, in a subject.

[1498] In some embodiments, provided herein is a method of treating a disease, e.g., cancer, in a subject comprising administering to the subject an effective amount of comprising the multifunctional polypeptide molecule as described herein, thereby treating the cancer.

[1499] In some embodiments, provided herein is a method of treating, e.g., preventing or reducing, cytokine release syndrome (CRS) and/or neurotoxicity (NT) in a subject, e.g., CRS and/or NT associated with a treatment, e.g., a previously administered treatment, comprising administering to the subject an effective amount of the multifunctional polypeptide molecule as described herein, thereby preventing CRS and/or NT in the subject.

[1500] In some embodiments, provided herein is a method of treating, e.g., preventing or reducing, cytokine release syndrome (CRS) and/or neurotoxicity (NT) in a subject, e.g., CRS and/or NT associated with a treatment, e.g., a previously administered treatment, comprising administering to the subject an effective of the multifunctional polypeptide molecule as described herein, thereby preventing CRS and/or NT in the subject.

[1501] In some embodiments, provided herein is a method of targeting a therapy, e.g., treatment, to a T cell in a subject having a disease, e.g. cancer, comprising administering an effective amount of: (i) the multifunctional polypeptide molecule as described herein; and (ii) the therapy, e.g., a tumor targeting therapy (e.g., an antibody that binds to a cancer antigen), e.g., as described herein, thereby targeting the therapy to the T cell in the subject.

[1502] In some embodiments, the method results in: reduced cytokine release syndrome (CRS) (e.g., lesser duration of CRS or no CRS), or a reduced severity of CRS (e.g., absence of severe CRS, e.g., CRS grade 4 or 5) compared to administration of (ii) alone.

[1503] In some embodiments, the multifunctional polypeptide molecule as described herein is administered concurrently with or after the administration of the treatment associated with CRS.

[1504] In some embodiments, provided herein is a method of treating a subject having a cancer, the method comprising: acquiring a value of the status of a TCRβV subfamily for the subject, wherein said value comprises a measure of the presence of, e.g., level or activity of, a TCRβV molecule in a sample from the subject, and administering an effective amount of the multifunctional polypeptide molecule as described herein: to the subject, thereby treating the subject.

[1505] In some embodiments, provided herein is a method of treating a subject having a cancer, the method comprising administering an effective amount of the multifunctional polypeptide molecule as described herein to the subject, wherein the subject has a higher, e.g., increased, level or activity of one or more TCRβV subfamilies, e.g., as described herein, compared to a reference level or activity of one or more TCRβV subfamilies, e.g., in a healthy subject, e.g., a subject not having a cancer.

[1506] In some embodiments, provided herein is a method of expanding a population of immune effector cells from a subject having a cancer, the method comprising: (i) isolating a biological sample comprising a population of immune effector cells from the subject: e.g., a peripheral blood sample, biopsy sample, or bone marrow sample; (ii) acquiring a value of the status of one or more TCRβV subfamilies for the subject, e.g., in the biological sample from the subject, wherein said value comprises a measure of the presence of, e.g., level or activity of, a TCRβV subfamily in a sample from the subject compared to a reference value, e.g., a sample from a health subject, wherein a value that is higher, e.g., increased, in the subject relative to the reference, e.g., healthy subject, is indicative of the presence of cancer in the subject, and (iii) contacting the biological sample comprising a population of immune effector cells with the multifunctional polypeptide molecule as described herein.

[1507] In some embodiments, the method further comprises administering the population of immune effector cells contacted with the multifunctional polypeptide molecule as described herein to the subject.

[1508] In some embodiments, the method further comprises measuring T cell function (e.g., cytotoxic activity, cytokine secretion, or degranulation) in the population of immune effector cells, e.g., compared to a reference population, e.g., an otherwise similar population not contacted with the multifunctional poly peptide molecule as described herein or a population of immune effector cells obtained from a healthy subject (e.g., a subject that does not have a cancer).

[1509] In some embodiments, the biological sample comprising the population of immune effector cells is contacted with the multifunctional polypeptide molecule as described herein identified as being higher, e.g., increased, in the biological sample.

[1510] In some embodiments, the biological sample comprising the population of immune effector cells is contacted with the multifunctional polypeptide molecule as described herein identified as being higher, e.g., increased, in the biological sample.

[1511] In some embodiments, the cancer is a solid tumor including but not limited to: melanoma, pancreatic (e.g., pancreatic adenocarcinoma) cancer, breast cancer, colorectal cancer (CRC), lung cancer (e.g., small or non-small cell lung cancer), skin cancer, ovarian cancer, or liver cancer.

[1512] In some embodiments, the cancer is a hematological cancer including, but not limited to: a B-cell or T cell malignancy, e.g., Hodgkin's lymphoma. Non-Hodgkin's lymphoma (e.g., B cell lymphoma, diffuse large B cell lymphoma (DLBCL), follicular lymphoma, chronic lymphocytic leukemia (B-CLL), mantle cell lymphoma, marginal zone B-cell lymphoma, Burkitt lymphoma, lymphoplasmacytic lymphoma, hairy cell leukemia), acute myeloid leukemia (AML), chronic myeloid leukemia, myelodysplastic syndrome, multiple myeloma, and acute lymphocytic leukemia.

[1513] In some embodiments, the cancer is B-CLL and the TCRβV molecule comprises: (i) TCRβ V6 subfamily comprising, e.g., TCRβ V6-4*01, TCRβ V6-4*02, TCRβ V6-9*01, TCRβ V6-8*01, TCRβ V6-5*01, TCRβ V6-6*02, TCRβ V6-6*01, TCRβ V6-2*01, TCRβ V6-3*01 or TCRβ V6-1*01; (ii) TCRβ V5 subfamily comprising TCRβ V5-6*01, TCRβ V5-4*01, or TCRβ V5-8*01; (iii) TCRβ V3 subfamily comprising TCRβ V3-1*01; (iv) TCRβ V2 subfamily comprising TCRβ V2*01; or (v) TCRβ V19 subfamily comprising TCRβ V19*01, or TCRβ V19*02.

[1514] In some embodiments, the cancer is melanoma and the TCRβV molecule comprises the TCRβ V6 subfamily comprising, e.g., TCRβ V6-4*01, TCRβ V6-4*02, TCRβ V6-9*01, TCRβ V6-8*01, TCRβ V6-5*01, TCRβ V6-6*02, TCRβ V6-6*01, TCRβ V6-2*01, TCRβ V6-3*01 or TCRβ V6-1*01.

[1515] In some embodiments, the cancer is DLBCL and the TCRβV molecule comprises: (i) TCRβ V13 subfamily comprising TCRβ V13*01; (ii) TCRβ V3 subfamily comprising TCRβ V3-1*01; or (iii) TCRβ V23 subfamily.

[1516] In some embodiments, the cancer is CRC and the TCRβV molecule comprises: (i) TCRβ V19 subfamily comprising TCRβ V19*01, or TCRβ V19*02 (ii) TCRβ V12 subfamily comprising TCRβ V12-4*01, TCRβ V12-3*01, or TCRβ V12-5*01 (iii) TCRβ V16 subfamily comprising TCRβ V16*01; or (iv) TCRβ V21 subfamily.

[1517] In some embodiments, the tumor comprises an antigen, e.g., a tumor antigen, e.g., a tumor associated antigen or a neoantigen; and/or the one or more TCRβV subfamilies recognize, e.g., bind to, the tumor antigen.

[1518] In some embodiments, the sample comprises a blood sample, e.g., a peripheral blood sample, a biopsy, e.g., a tumor biopsy, or a bone marrow sample.

[1519] In some embodiments, the sample comprises a biological sample comprising immune cells, e.g., TCRβV expressing cells (e.g., TCRβV+ cells), T cells, or NK cells.'

[1520] In some embodiments, the T cells comprise a CD4 T cell, a CD8 T cell, (e.g., an effector T cell or a memory T cell (e.g., a memory effector T cell (e.g., TEM cell, e.g., TEMRA cell), or a tumor infiltrating lymphocyte (TIL).

[1521] In some embodiments, the method results in an expansion, e.g., in vivo or ex vivo expansion, of at least 1.1-1000 fold, e.g., 1.1-10, 10-100, 100-200, 200-300, 300-400, 400-500, 500-600, 600-700, 700-800, 800-900, or 900-1000 fold expansion of an immune effector cell population comprising a TCRVB expressing immune effector cell, e.g., T cell.

[1522] In some embodiments, the population of cells is expanded in an appropriate media (e.g., media described herein) that includes one or more cytokines, e.g., IL-2, IL-7, IL-15, or a combination thereof.

[1523] In some embodiments, the population of cells is expanded for a period of at least about 4 hours. 6 hours, 10 hours, 12 hours. 15 hours, 18 hours, 20 hours, or 22 hours, or for at least 1, 2, 3, 4, 5, 6, 7, 8, 9, 10, 11, 12, 13, 14, 15, 16, 17, 18, 19, 20 or 21 days, or for at least about 1 week, 2 weeks, 3 weeks, 4 weeks, 5 weeks, 6 weeks, 7 weeks or 8 weeks.

[1524] In some embodiments, expansion of the population of immune cells, is compared to expansion of a similar population of cells with an antibody that binds to: a CD3 molecule, e.g., CD3 epsilon (CD3e) molecule; or a TCR alpha (TCRα) molecule.

[1525] In some embodiments, expansion of the population of immune cells, is compared to expansion of a similar population of cells not contacted with the anti-TCRβV antibody molecule.

[1526] In some embodiments, expansion of the population of T cells having a memory-like phenotype. e.g., memory effector T cells, e.g. TEM cells, e.g., TEMRA cells, is compared to expansion of a similar population of cells with an antibody that binds to: a CD3 molecule, e.g., CD3 epsilon (CD3e) molecule; or a TCR alpha (TCRα) molecule.

[1527] In some embodiments, the population of expanded T cells having a memory-like phenotype, e.g., effector memory cells, comprises cells which: (i) have a detectable level of CD45RA, e.g., express or re-express CD45RA; (ii) have low or no expression of CCR7; and/or (iii) have a detectable level of CD95, e.g., express CD95, e.g., a population of CD45RA+. CCR7-CD95+ T cells, optionally wherein the T cells comprise CD3+, CD4+ or CD8+ T cells.

[1528] In some embodiments, the method results in expansion of, e.g., selective or preferential expansion of, T cells expressing a T cell receptor (TCR) comprising a TCR alpha and/or TCR beta molecule, e.g., TCR alpha-beta T cells (αβ T cells).

[1529] In some embodiments, the method results in expansion of αβT cells over expansion of T cells expressing a TCR comprising a TCR gamma and/or TCR delta molecule, e.g., TCR gamma-delta T cells (γδ T cells).

[1530] In some embodiments, the TCRβV binding moiety or molecule comprises an antigen binding domain comprising a light chain variable region (VL) comprising one, two or all of a LC CDR1, a LC CDR2 and a LC CDR3 of a VL disclosed in Tables 1, 2, 10, 11, 12 or 13.

[1531] In some embodiments, the TCRβV binding moiety or molecule comprises an antigen binding domain comprising a heavy chain variable region (VH) comprising one, two or all of a HC CDR1, a HC CDR2 and a HC CDR3 of a VH disclosed in Tables 1, 2, 10, 11, 12 or 13.

[1532] In some embodiments, the TCRβV binding moiety or molecule comprises a light chain comprising a framework region, e.g., framework region 1 (FR1), comprising one, two or all (e.g., three) of: (i) an Aspartic Acid at position 1, e.g., a substitution at position 1 according to Kabat numbering, e.g., a Alanine to Aspartic Acid substitution; or (ii) an Asparagine at position 2, e.g., a substitution at position 2 according to Kabat numbering, e.g., a Isoleucine to Asparagine, a Serine to Asparagine, or a Tyrosine to Asparagine substitution; or (iii) a Leucine at position 4, e.g., a substitution at position 4 according to Kabat numbering, e.g., a Methionine to Leucine substitution, wherein the substitution is relative to a human germline light chain framework region sequence.

[1533] In some embodiments, the TCRβV binding moiety or molecule comprises a light chain comprising a framework region, e.g., framework region 3 (FR3), comprising one, two or all (e.g., three) of: (i) a Glycine at position 66, e.g., a substitution at position 66 according to Kabat numbering, e.g., a Lysine to Glycine, or a Serine to Glycine substitution; or (ii) an Asparagine at position 69, e.g., a substitution at position 69 according to Kabat numbering, e.g., a Threonine to Asparagine substitution; or (iii) a Tyrosine at position 71, e.g., a substitution at position 71 according to Kabat numbering, e.g., a Phenylalanine to Tyrosine, or Alanine to Tyrosine substitution, wherein the substitution is relative to a human germline light chain framework region sequence.

[1534] In some embodiments, the TCRβV binding moiety or molecule binds to an outward facing region (e.g., epitope) on a TCRβV protein, e.g., as depicted by the circled area in FIG. 24A. In some embodiments, the outward facing region on the TCRβV protein comprises a structurally conserved region of TCRβV, e.g., a region of TCRβV having a similar structure across one or more TCRβV subfamilies.

[1535] In some embodiments, the method further comprises administering (e.g., sequentially, simultaneously or concurrently) a second agent, e.g., therapeutic agent, e.g., as described herein.

[1536] In some embodiments, the second agent, e.g., therapeutic agent, comprises a chemotherapeutic agent, a biologic agent, hormonal therapy), radiation, or surgery.

[1537] In some embodiments, the disease is a cancer, e.g., a solid tumor or a hematological cancer, or a metastatic lesion.

[1538] In some embodiments, the cancer antigen is BCMA or FcRH5.

[1539] In some aspects, described herein is a multifunctional polypeptide molecule comprising a first polypeptide chain, a second polypeptide chain, and at least one cytokine polypeptide or a functional fragment or a functional variant thereof, wherein the first polypeptide chain and the second polypeptide chain are non-contiguous, wherein (i) the first polypeptide chain comprises a first portion of a dimerization module linked to (A) a first TCRβV-binding moiety comprising a first heavy chain variable domain (VH) and a first light chain variable domain (VL), or a single domain antibody, or (B) a first portion of a first TCRβV-binding moiety comprising a VH of the first TCRβV-binding moiety, wherein when the first polypeptide chain comprises the first portion of the first TCRβV-binding moiety, the multifunctional polypeptide molecule further comprises a third polypeptide chain comprising a second portion of the first TCRβV-binding moiety comprising a VL of the first TCRβV-binding moiety, wherein the third polypeptide chain is non-contiguous with the first polypeptide chain and the second polypeptide chain; and (ii) the second polypeptide chain comprises a second portion of the dimerization module: wherein (a) the multifunctional poly peptide molecule comprises a single TCRβV-binding moiety and the at least one cytokine polypeptide or a functional fragment or a functional variant thereof is covalently linked to the second polypeptide chain, or (b) the multifunctional polypeptide molecule further comprises a second TCRβV-binding moiety and the at least one cytokine polypeptide or a functional fragment or a functional variant thereof is covalently linked to the first polypeptide chain, the second polypeptide chain, the third polypeptide chain when the multifunctional polypeptide molecule further comprises the third polypeptide chain, or a combination thereof.

[1540] In some embodiments, the multifunctional polypeptide molecule comprises the second TCRβV-binding moiety, and the second portion of the dimerization module is linked to: (A) a second TCRβV-binding moiety comprising a second VH and a second VL, or a single domain antibody, or (B) a first portion of a second TCRβV-binding moiety comprising a VH of the second TCRβV-binding moiety, wherein when the second polypeptide chain comprises the first portion of the second TCRβV-binding moiety, the multifunctional polypeptide molecule further comprises a fourth polypeptide chain comprising a second portion of the second TCRβV-binding moiety comprising a VL of the second TCRβV-binding moiety, wherein the fourth polypeptide chain is non-contiguous with the first polypeptide chain, the second polypeptide chain, and the third polypeptide chain: wherein the at least one cytokine polypeptide or a functional fragment or a functional variant thereof is covalently linked to the first polypeptide chain, the second polypeptide chain, the third polypeptide chain, the fourth polypeptide chain when the multifunctional polypeptide molecule further comprises the fourth polypeptide chain, or a combination thereof.

[1541] In another aspect, described herein is multifunctional polypeptide molecule comprising a first polypeptide chain, a second polypeptide chain, and at least one cytokine polypeptide or a functional fragment or a functional variant thereof, wherein the first polypeptide chain and the second polypeptide chain are non-contiguous, wherein (i) the first polypeptide chain comprises a first portion of a dimerization module linked to a first portion of a first TCRβV-binding moiety comprising a VH of the first TCRβV-binding moiety, wherein the multifunctional polypeptide molecule further comprises a third polypeptide chain comprising a second portion of the first TCRβV-binding moiety comprising a VL of the first TCRβV-binding moiety, wherein the third polypeptide chain is non-contiguous with the first polypeptide chain and the second polypeptide chain; and (ii) the second polypeptide chain comprises a second portion of the dimerization module, wherein the at least one cytokine polypeptide or a functional fragment or a functional variant thereof is covalently linked to the second polypeptide chain.

[1542] In some embodiments, the first portion of the dimerization module and the second portion of the dimerization module are dimerized.

[1543] In some embodiments, the first polypeptide chain comprises: (A) the first TCRβV-binding moiety comprising the first VH and the first VL, wherein the first TCRβV-binding moiety further comprises a first heavy chain constant domain 1 (CH1) linked to the first VH; or (B) the first portion of the first TCRβV-binding moiety comprising the VH of the first TCRβV-binding moiety, wherein the first portion of the first TCRβV-binding moiety further comprises a first CH1 linked to the VH of the first TCRβV-binding moiety.

[1544] In some embodiments, the first CH1 is linked to the C-terminus of the first VH or the C-terminus of the VH of the first TCRβV-binding moiety.

[1545] In some embodiments, the second poly peptide chain comprises: (A) the second TCRβV-binding moiety comprising the second VH and the second VL, wherein the second TCRβV-binding moiety further comprises a second CH1 linked to the second VH; or (B) the first portion of the second TCRβV-binding moiety comprising the VH of the second TCRβV-binding moiety, wherein the first portion of the second TCRβV-binding moiety further comprises a second CH1 linked to the VH of the second TCRβV-binding moiety.

[1546] In some embodiments, the second CH1 is linked to the C-terminus of the second VH or the C-terminus of the VH of the second TCRβV-binding moiety.

[1547] In some embodiments, the multifunctional polypeptide molecule comprises: (1) the first polypeptide chain comprising the first TCRβV-binding moiety that comprises the first VH and the first VL, wherein the first TCRβV-binding moiety further comprises a first light chain constant domain (CL) linked to the first VL; or (2) the first polypeptide chain comprising the first portion of the first TCRβV-binding moiety and the third polypeptide chain comprising the second portion of the first TCRβV-binding moiety, wherein the second portion of the first TCRβV-binding moiety further comprises a first CL linked to the VL of the first TCRβV-binding moiety.

[1548] In some embodiments, the first CL is linked to the C-terminus of the first VL or the C-terminus of the VL of the first TCRβV-binding moiety.

[1549] In some embodiments, the multifunctional polypeptide molecule comprises: (1) the second polypeptide chain comprising the second TCRβV-binding moiety that comprises the second VH and the second VL, wherein the second TCRβV-binding moiety further comprises a second CL linked to the second VL; or (2) the second polypeptide chain comprising the first portion of the second TCRβV-binding moiety and the fourth polypeptide chain comprising the second portion of the second TCRβV-binding moiety, wherein the second portion of the second TCRβV-binding moiety further comprises a second CL linked to the VL of the second TCRβV-binding moiety.

[1550] In some embodiments, the second CL is linked to the C-terminus of the second VL or the C-terminus of the VL of the second TCRβV-binding moiety.

[1551] In some embodiments, the first portion of the dimerization module is linked to the C-terminus of (A) the first TCRβV-binding moiety comprising the first VH and the first VL or the single domain antibody, or the C-terminus of (B) the first portion of the first TCRβV-binding moiety comprising the VH of the first TCRβV-binding moiety.

[1552] In some embodiments, the multifunctional polypeptide molecule comprises the second TCRβV-binding moiety, and the second portion of the dimerization module is linked to the C-terminus of (A) the second TCRβV-binding moiety comprising the second VH and the second VL or the single domain antibody, or the C-terminus of (B) the first portion of the second TCRβV-binding moiety comprising the VH of the second TCRβV-binding moiety.

[1553] In some embodiments, the multifunctional polypeptide molecule comprises a single TCRβV-binding moiety, and the at least one cytokine polypeptide or a functional fragment or a functional variant thereof is covalently linked to the N-terminus of the second polypeptide chain, the C-terminus of the second polypeptide chain, or a combination thereof.

[1554] In some embodiments, the at least one cytokine polypeptide or a functional fragment or a functional variant thereof is within a single contiguous polypeptide chain of the second polypeptide chain.

[1555] In some embodiments, (a) the N-terminus of the first polypeptide chain is linked to a cytokine polypeptide or a functional fragment or a functional variant thereof; the C-terminus of the first polypeptide chain is linked to a cytokine polypeptide or a functional fragment or a functional variant thereof; or a combination thereof; (b) the N-terminus of the second polypeptide chain is linked to a cytokine polypeptide or a functional fragment or a functional variant thereof; the C-terminus of the second polypeptide chain is linked to a cytokine polypeptide or a functional fragment or a functional variant thereof; or a combination thereof; (c) the N-terminus of the third polypeptide chain is linked to a cytokine polypeptide or a functional fragment or a functional variant thereof; the C-terminus of the third polypeptide chain is linked to a cytokine polypeptide or a functional fragment or a functional variant thereof; or a combination thereof; (d) the N-terminus of the fourth polypeptide chain is linked to a cytokine polypeptide or a functional fragment or a functional variant thereof; the C-terminus of the fourth polypeptide chain is linked to an cytokine polypeptide or a functional fragment or a functional variant thereof; or a combination thereof; or (e) a combination thereof.

[1556] In some embodiments. (a-1) the N-terminus of the first polypeptide chain is linked to a cytokine polypeptide or a functional fragment or a functional variant thereof; the C-terminus of the first polypeptide chain is linked to a cytokine polypeptide or a functional fragment or a functional variant thereof; or a combination thereof; and (a-2) the N-terminus of the second polypeptide chain is linked to a cytokine polypeptide or a functional fragment or a functional variant thereof; the C-terminus of the second poly peptide chain is linked to a cytokine polypeptide or a functional fragment or a functional variant thereof; or a combination thereof; (b-1) the N-terminus of the first polypeptide chain is linked to a cytokine polypeptide or a functional fragment or a functional variant thereof, the C-terminus of the first polypeptide chain is linked to a cytokine poly peptide or a functional fragment or a functional variant thereof; or a combination thereof; and (b-2) the N-terminus of the third polypeptide chain is linked to a cytokine polypeptide or a functional fragment or a functional variant thereof; the C-terminus of the third polypeptide chain is linked to a cytokine polypeptide or a functional fragment or a functional variant thereof; or a combination thereof; (c-1) the N-terminus of the first polypeptide chain is linked a cytokine polypeptide or a functional fragment or a functional variant thereof; the C-terminus of the first polypeptide chain is linked to a cytokine polypeptide or a functional fragment or a functional variant thereof; or a combination thereof; and (c-2) the N-terminus of the fourth polypeptide chain is linked to a cytokine polypeptide or a functional fragment or a functional variant thereof; the C-terminus of the fourth polypeptide chain is linked to a cytokine polypeptide or a functional fragment or a functional variant thereof; or a combination thereof; (d-1) the N-terminus of the second polypeptide chain is linked to a cytokine polypeptide or a functional fragment or a functional variant thereof; the C-terminus of the second polypeptide chain is linked to a cytokine polypeptide or a functional fragment or a functional variant thereof; or a combination thereof; and (d-2) the N-terminus of the third polypeptide chain is linked to a cytokine polypeptide or a functional fragment or a functional variant thereof; the C-terminus of the third polypeptide chain is linked to a cytokine polypeptide or a functional fragment or a functional variant thereof; or a combination thereof; (e-1) the N-terminus of the second polypeptide chain is linked to a cytokine polypeptide or a functional fragment or a functional variant thereof; the C-terminus of the second polypeptide chain is linked to a cytokine polypeptide or a functional fragment or a functional variant thereof; or a combination thereof; and (e-2) the N-terminus of the fourth polypeptide chain is linked to a cytokine polypeptide or a functional fragment or a functional variant thereof; the C-terminus of the fourth polypeptide chain is linked to a cytokine polypeptide or a functional fragment or a functional variant thereof; or a combination thereof; or (f-1) the N-terminus of the third polypeptide chain is linked to a cytokine polypeptide or a functional fragment or a functional variant thereof; the C-terminus of the third polypeptide chain is linked to a cytokine polypeptide or a functional fragment or a functional variant thereof; or a combination thereof; and (f-2) the N-terminus of the fourth polypeptide chain is linked to a cytokine polypeptide or a functional fragment or a functional variant thereof; the C-terminus of the fourth polypeptide chain is linked to a cytokine polypeptide or a functional fragment or a functional variant thereof.

[1557] In some embodiments. (a-1) the N-terminus of the first polypeptide chain is linked to a cytokine polypeptide or a functional fragment or a functional variant thereof; the C-terminus of the first polypeptide chain is linked to a cytokine polypeptide or a functional fragment or a functional variant thereof; or a combination thereof; (a-2) the N-terminus of the second polypeptide chain is linked to a cytokine polypeptide or a functional fragment or a functional variant thereof; the C-terminus of the second polypeptide chain is linked to a cytokine polypeptide or a functional fragment or a functional variant thereof; or a combination thereof; and (a-3) the N-terminus of the third polypeptide chain is linked to a cytokine polypeptide or a functional fragment or a functional variant thereof; the C-terminus of the third polypeptide chain is linked to a cytokine polypeptide or a functional fragment or a functional variant thereof; or a combination thereof; (b-1) the N-terminus of the first polypeptide chain is linked a cytokine polypeptide or a functional fragment or a functional variant thereof; the C-terminus of the first polypeptide chain is linked to a cytokine polypeptide or a functional fragment or a functional variant thereof; or a combination thereof; (b-2) the N-terminus of the second polypeptide chain is linked to a cytokine polypeptide or a functional fragment or a functional variant thereof; the C-terminus of the second polypeptide chain is linked to a cytokine polypeptide or a functional fragment or a functional variant thereof; or a combination thereof; and (b-3) the N-terminus of the fourth polypeptide chain is linked to a cytokine polypeptide or a functional fragment or a functional variant thereof; the C-terminus of the fourth polypeptide chain is linked to a cytokine polypeptide or a functional fragment or a functional variant thereof, or a combination thereof; or (c-1) the N-terminus of the second polypeptide chain is linked to a cytokine polypeptide or a functional fragment or a functional variant thereof; the C-terminus of the second polypeptide chain is linked to a cytokine polypeptide or a functional fragment or a functional variant thereof; or a combination thereof; (c-2) the N-terminus of the third polypeptide chain is linked to a cytokine polypeptide or a functional fragment or a functional variant thereof; the C-terminus of the third polypeptide chain is linked to a cytokine polypeptide or a functional fragment or a functional variant thereof; or a combination thereof; and (c-3) the N-terminus of the fourth polypeptide chain is linked to a cytokine poly peptide or a functional fragment or a functional variant thereof; the C-terminus of the fourth polypeptide chain is linked to a cytokine polypeptide or a functional fragment or a functional variant thereof; or a combination thereof.

[1558] In some embodiments, the N-terminus of the first polypeptide chain is linked to a cytokine polypeptide or a functional fragment or a functional variant thereof; the C-terminus of the first polypeptide chain is linked to a cytokine polypeptide or a functional fragment or a functional variant thereof; or a combination thereof; the N-terminus of the second polypeptide chain is linked to a cytokine polypeptide or a functional fragment or a functional variant thereof; the C-terminus of the second polypeptide chain is linked to a cytokine polypeptide or a functional fragment or a functional variant thereof; or a combination thereof; the N-terminus of the third polypeptide chain is linked to a cytokine polypeptide or a functional fragment or a functional variant thereof; the C-terminus of the third polypeptide chain is linked to a cytokine polypeptide or a functional fragment or a functional variant thereof; or a combination thereof; and the N-terminus of the fourth polypeptide chain is linked to a cytokine polypeptide or a functional fragment or a functional variant thereof; the C-terminus of the fourth polypeptide chain is linked to a cytokine polypeptide or a functional fragment or a functional variant thereof; or a combination thereof.

[1559] In some embodiments, the cytokine polypeptide or a functional fragment or a functional variant thereof is within a single contiguous polypeptide chain of the first polypeptide chain, the second polypeptide chain, the third cytokine poly peptide, or the fourth cytokine polypeptide to which the cytokine polypeptide or a functional fragment or a functional variant thereof is linked.

[1560] In some embodiments, the multifunctional polypeptide molecule further comprises: (i) a linker between the first portion of the dimerization module and the first TCRβV-binding moiety comprising the first VH and the first VL or the single domain antibody, or the first portion of the first TCRβV-binding moiety comprising the VH of the first TCRβV-binding moiety; (ii) a linker between the second portion of the dimerization module and the second TCRβV-binding moiety comprising the second VH and the second VL or the single domain antibody, or the first portion of the second TCRβV-binding moiety comprising the VH of the second TCRβV-binding moiety; (iii) a linker between the first VH and the first VL; (iv) a linker between the second VH and the second VL; (v) a linker between the first CH1 and the first VH, or the VH of the first TCRβV-binding moiety; (vi) a linker between the second CH1 and the second VH, or the VH of the second TCRβV-binding moiety; (vii) a linker between the first CL and the first VL, or the VL of the first TCRβV-binding moiety; (vii) a linker between the second CL and the second VL, or the VL of the second TCRβV-binding moiety; (viii) a linker between the at least one cytokine polypeptide or a functional fragment or a functional variant thereof and the first polypeptide chain, a linker between the at least one cytokine polypeptide or a functional fragment or a functional variant thereof and the second polypeptide chain, a linker between the at least one cytokine polypeptide or a functional fragment or a functional variant thereof and the third polypeptide chain, a linker between the at least one cytokine polypeptide or a functional fragment or a functional variant thereof and the fourth polypeptide chain, or a combination thereof; or (ix) a combination thereof.

[1561] In some embodiments, the linker is selected from the group consisting of a cleavable linker, a non-cleavable linker, a peptide linker, a flexible linker, a rigid linker, a helical linker, and a non-helical linker.

[1562] In some embodiments, the linker is the peptide linker and the linker comprises the sequence of SEQ ID NO: 3308 or SEQ ID NO: 3643.

[1563] In some embodiments, the multifunctional polypeptide molecule is an isolated multifunctional polypeptide molecule.

[1564] In some embodiments, the multifunctional polypeptide molecule comprises: (i) the first polypeptide chain comprising the first portion of the dimerization module linked to the C-terminus of the first portion of the first TCRβV-binding moiety; (ii) the second polypeptide chain comprising the second portion of the dimerization module. (iii) the third polypeptide chain comprising the second portion of the first TCRβV-binding moiety; and (iv) a cytokine polypeptide or a functional fragment or a functional variant thereof covalently linked to the N-terminus of the second polypeptide chain, wherein the multifunctional polypeptide molecule comprises a single TCRβV-binding moiety.

[1565] In some embodiments, the multifunctional polypeptide molecule comprises: (i) the first poly peptide chain comprising the first portion of the dimerization module linked to the C-terminus of the first portion of the first TCRβV-binding moiety; (ii) the second polypeptide chain comprising the second portion of the dimerization module linked to the C-terminus of the first portion of the second TCRβV-binding moiety; (iii) the third poly peptide chain comprising the second portion of the first TCRβV-binding moiety; (iv) the fourth polypeptide chain comprising the second portion of the second TCRβV-binding moiety; (v) a cytokine polypeptide or a functional fragment or a functional variant thereof covalently linked to the C-terminus of the third polypeptide chain, and (vi) a cytokine polypeptide or a functional fragment or a functional variant thereof covalently linked to the C-terminus of the fourth polypeptide chain.

[1566] In some embodiments, the multifunctional polypeptide molecule comprises: (i) the first polypeptide chain comprising the first portion of the dimerization module linked to the C-terminus of the first portion of the first TCRβV-binding moiety; (ii) the second polypeptide chain comprising the second portion of the dimerization module linked to the C-terminus of the first portion of the second TCRβV-binding moiety. (iii) the third poly peptide chain comprising the second portion of the first TCRβV-binding moiety; (iv) the fourth polypeptide chain comprising the second portion of the second TCRβV-binding moiety; and (v) a cytokine polypeptide or a functional fragment or a functional variant thereof covalently linked to the C-terminus of the third polypeptide chain or the C-terminus of the fourth polypeptide chain, but not to both.

[1567] In some embodiments, the multifunctional polypeptide molecule comprises: (i) the first poly peptide chain comprising the first portion of the dimerization module linked to the C-terminus of the first portion of the first TCRβV-binding moiety; (ii) the second polypeptide chain comprising the second portion of the dimerization module linked to the C-terminus of the first portion of the second TCRβV-binding moiety. (iii) the third polypeptide chain comprising the second portion of the first TCRβV-binding moiety; (iv) the fourth polypeptide chain comprising the second portion of the second TCRβV-binding moiety; and (v) a cytokine polypeptide or a functional fragment or a functional variant thereof covalently linked to the C-terminus of the first polypeptide chain or the C-terminus of the second polypeptide chain, but not to both.

[1568] In some embodiments, the first TCRβV-binding moiety, the second TCRβV-binding moiety, or a combination thereof comprises any one selected from the group consisting of a Fab, a F(ab′)2, an Fv, a single chain Fv (scFv), a single domain antibody, a diabody (dAb), a camelid antibody, and a combination thereof.

[1569] In some embodiments, the first TCRβV-binding moiety, the second TCRβV-binding moiety, or a combination thereof comprises the Fab or the scFv.

[1570] In some embodiments, the TCRβV-binding moiety is the sole antigen-binding moiety of the multifunctional polypeptide molecule.

[1571] In some embodiments, the multifunctional polypeptide molecule comprises two or more of the at least one cytokine polypeptides.

[1572] In some embodiments, the at least one cytokine polypeptide comprises interleukin-2 (IL-2) or a fragment thereof.

[1573] In some embodiments, the at least one cytokine polypeptide comprises a sequence having at least 75% sequence identity to the sequence of SEQ ID NO: 2191.

[1574] In some embodiments, the variant is an IL-2 variant comprising a substitution mutation.

[1575] In some embodiments, the variant is an IL-2 variant comprising C125A mutation.

[1576] In some embodiments, the variant comprises a sequence having at least 75% sequence identity to the sequence of SEQ ID NO: 2270.

[1577] In some embodiments, the first portion of the dimerization module comprises a first immunoglobulin constant regions (Fc regions) and the second portion of the dimerization module comprises a second Fc region.

[1578] In some embodiments, the first Fc region, the second Fc region, or a combination thereof is selected from the group consisting of an IgG1 Fc region or a fragment thereof, an IgG2 Fc region or a fragment thereof, an IgG3 Fc region or a fragment thereof, an IgGA1 Fc region or a fragment thereof, an IgGA2 Fc region or a fragment thereof, an IgG4 Fc region or a fragment thereof, an IgJ Fc region or a fragment thereof, an IgM Fc region or a fragment thereof, an IgD Fc region or a fragment thereof, and an IgE Fc region or a fragment thereof.

[1579] In some embodiments, the first Fc region, the second Fc region, or a combination thereof is selected from the group consisting of a human IgG1 Fc region or a fragment thereof, a human IgG2 Fc region or a fragment thereof, and a human IgG4 Fc region or a fragment thereof.

[1580] In some embodiments, the first Fc region, the second Fc region, or a combination thereof comprises an Fc interface with one or more of: a paired cavity-protuberance, an electrostatic interaction, or a strand-exchange, wherein the dimerization of the first Fc region and the second Fc region is enhanced as indicated by a greater ratio of heteromultimer:homomultimer forms relative to a dimerization of Fc regions with a non-engineered interface.

[1581] In some embodiments, the first Fc region, the second Fc region, or a combination thereof comprises an amino acid substitution listed in Table 14.

[1582] In some embodiments, the first Fc region, the second Fc region, or a combination thereof comprises an Asn297Ala (N297A) mutation or a Leu234Ala/Leu235Ala (LALA) mutation.

[1583] In some embodiments, the first Fc region, the second Fc region, or a combination thereof comprises a sequence having at least 75% sequence identity to the sequence of SEQ ID NO: 40, SEQ ID NO: 42, SEQ ID NO: 3645, SEQ ID NO: 3646, SEQ ID NO: 3647, SEQ ID NO:3648, or SEQ ID NO: 3649.

[1584] In some embodiments, the first TCRβV-binding moiety, the second TCRβV-binding moiety, or a combination thereof binds to one or more of a TCRβV subfamily selected from the group consisting of: (i) TCRβ V2 subfamily comprising TCRβ V2*01; (ii) TCRβ V3 subfamily comprising TCRβ V3-1*01; (iii) TCRβ V4 subfamily comprising one or more selected from TCRβ V4-1, TCRβ V4-2, and TCRβ V4-3; (iv) TCRβ V5 subfamily comprising one or more selected from TCRβ V5-6*01, TCRβ V5-4*01, TCRβ V5-1*01, and TCRβ V5-8*01; (v) the TCRβ V6 subfamily comprising one or more selected from TCRβ V6-4*01. TCRβ V6-4*02, TCRβ V6-9*01, TCRβ V6-8*01, TCRβ V6-5*01, TCRβ V6-6*02, TCRβ V6-6*01, TCRB V6-2*01, TCRβ V6-3*01, and TCRβ V6-1*01; (vi) TCRβ V9 subfamily; (vii) TCRβ V10 subfamily comprising one or more selected from TCRβ V10-1*01, TCRβ V10-1*02, TCRβ V10-3*01, and TCRβ V10-2*01; (viii) TCRβ V11 subfamily comprising TCRβ V11-2; (ix) TCRβ V12 subfamily comprising one or more selected from TCRβ V12-4*01, TCRβ V12-3*01, and TCRβ V12-5*01: (x) TCRβ V13 subfamily comprising TCRβ V13*01: (xi) TCRβ V16 subfamily comprising TCRβ V16*01: (xii) TCRβ V19 subfamily comprising one or more selected from TCRβ V19*01 and TCRβ V19*02; (xiii) TCRβ V21 subfamily: (xiv) TCRβ V23 subfamily: (xv) TCRβ V27 subfamily; and (xvi) TCRβ V28 subfamily.

[1585] In some embodiments, the multifunctional polypeptide molecule comprises the first TCRβV-binding moiety and the second TCRβV-binding moiety, and the first TCRβV-binding moiety and the second TCRβV-binding moiety are same.

[1586] In some embodiments, the multifunctional polypeptide molecule comprises the first TCRβV-binding moiety and the second TCRβV-binding moiety, and the first TCRβV-binding moiety and the second TCRβV-binding moiety are different.

[1587] In some embodiments, the first TCRβV-binding moiety and the second TCRβV-binding moiety binds: (i) one or more of a TCRβ V6 subfamily member and one or more of a TCRβ V10 subfamily member, respectively. (ii) one or more of a TCRβ V6 subfamily member and one or more of a TCRβ V5 subfamily member, respectively; (iii) one or more of a TCRβ V6 subfamily member and one or more of a TCRβ V12 subfamily member, respectively; (iv) one or more of a TCRβ V10 subfamily member and one or more of a TCRβ V5 subfamily member, respectively; (v) one or more of a TCRβ V10 subfamily member and one or more of a TCRβ V12 subfamily member, respectively; or (vi) one or more of a TCRβ V5 subfamily member and one or more of a TCRβ V12 subfamily member, respectively.

[1588] In some embodiments, the first TCRβV-binding moiety, the second TCRβV-binding moiety, or a combination thereof comprises: (i) a HC CDR1, a HC CDR2 and a HC CDR3 of an amino acid sequence having at least 75% sequence identity to any one of the CDR1, CDR2, and CDR3 sequences listed in Table 1; (ii) a LC CDR1, a LC CDR2, and a LC CDR3 of an amino acid sequence having at least 75% sequence identity to any one of the CDR1, CDR2, and CDR3 the sequences listed in Table 1; or (iii) a combination thereof.

[1589] In some embodiments, the first TCRβV-binding moiety, the second TCRβV-binding moiety, or a combination thereof comprises: (i) a VH comprising a framework region (FR) comprising a framework 1 (FR1), a framework region 2 (FR2), a framework region 3 (FR3), and a framework region 4 (FR4) that have at least 75% sequence identity to a non-murine germline FR1, a non-murine germline FR2, a non-murine germline FR3, and a non-murine germline FR4; (ii) a VL comprising a FR comprising a FR1, a FR2, a FR3, and a FR4 that have at least 75% sequence identity to a non-murine germline FR1, a non-murine germline FR2, a non-murine germline FR3, and a non-murine germline FR4; or (iii) a combination thereof.

[1590] In some embodiments, the VH comprises the FR3 comprising (i) a Threonine at position 73 according to Kabat numbering; (ii) a Glycine a position 94 according to Kabat numbering; or (iii) a combination thereof.

[1591] In some embodiments, the VL comprises the FR1 comprising a Phenylalanine at position 10 according to Kabat numbering.

[1592] In some embodiments, the VL comprises the FR2 comprising (i) a Histidine at position 36 according to Kabat numbering; (ii) an Alanine at position 46 according to Kabat numbering; or (iii) a combination thereof.

[1593] In some embodiments, the VL comprises the FR3 comprising a Phenylalanine at position 87 according to Kabat numbering.

[1594] In some embodiments, the first TCRβV-binding moiety, the second TCRβV-binding moiety, or a combination thereof comprises: (i) a HC CDR1, a HC CDR2 and a HC CDR3 of an amino acid sequence having at least 75% sequence identity to any one of the CDR1, CDR2, and CDR3 sequences listed in Table 2; (ii) a LC CDR1, a LC CDR2, and a LC CDR3 of an amino acid sequence having at least 75% sequence identity to any one of the CDR1, CDR2, and CDR3 sequences listed in Table 2; or (iii) a combination thereof.

[1595] In some embodiments, the first TCRβV-binding moiety, the second TCRβV-binding moiety, or a combination thereof comprises: (i) a VH comprising a FR comprising a FR1, a FR2, a FR3, and a FR4 that have at least 75% sequence identity to a FR1, a FR2, a FR3, and a FR4 of a humanized B-H LC of Table 2; (ii) a VL comprising a FR comprising a FR1, a FR2, a FR3, and a FR4 that have at least 75% sequence identity to a FR1, a FR2, a FR3, and a FR4 of a humanized B-H LC of Table 2; or (iii) a combination thereof.

[1596] In some embodiments, the first TCRβV-binding moiety, the second TCRβV-binding moiety, or a combination thereof comprises: (i) a VH comprising a sequence having at least 75% sequence identity to the VH sequence of a humanized Antibody B-H listed in Table 2; (ii) a VL comprising a sequence having at least 75% sequence identity to the VL sequence of a humanized Antibody B-H listed in Table 2; or (iii) a combination thereof.

[1597] In some embodiments, the first polypeptide chain, the second polypeptide chain, or a combination thereof comprises a heavy chain constant region having a sequence having at least 75% sequence identity to any one of the sequences listed in Table 3, 21, or 22 or a combination thereof.

[1598] In some embodiments, the first polypeptide chain, the second polypeptide chain, or a combination thereof comprises a heavy chain constant region of an IgM or a fragment thereof.

[1599] In some embodiments, the heavy chain constant region of the IgM comprises a sequence having at least 75% sequence identity to the sequence of SEQ ID NO: 73.

[1600] In some embodiments, the first polypeptide chain, the second poly peptide chain, or a combination thereof comprises a heavy chain constant region of an IgJ or a fragment thereof.

[1601] In some embodiments, the heavy chain constant region of the IgJ comprises a sequence having at least 75% sequence identity to the sequence of SEQ ID NO: 76.

[1602] In some embodiments, the first polypeptide chain, the second polypeptide chain, a combination thereof comprises a heavy chain constant region of an IgGA1 or a fragment thereof.

[1603] In some embodiments, the heavy chain constant region of the IgGA1 comprises a sequence having at least 75% sequence identity to the sequence of SEQ ID NO. 74.

[1604] In some embodiments, the first polypeptide chain, the second poly peptide chain, or a combination thereof comprises a heavy chain constant region of an IgGA2 or a fragment thereof.

[1605] In some embodiments, the heavy chain constant region of the IgGA2 comprises a sequence having at least 75% sequence identity to the sequence of SEQ ID NO: 75.

[1606] In some embodiments, the first polypeptide chain, the second polypeptide chain, or a combination thereof comprises a heavy chain constant region of an IgG1 or a fragment thereof.

[1607] In some embodiments, the heavy chain constant region of the IgG1 comprises a sequence having at least 75% sequence identity to the sequence of SEQ ID NO: 41 or SEQ ID NO. 3645.

[1608] In some embodiments, the first polypeptide chain, the second polypeptide chain, the third polypeptide chain, the fourth polypeptide chain, or a combination thereof comprises a light chain constant region having a sequence having at least 75% sequence identity to any one of the sequences listed in Table 3, 21, or 22 or a combination thereof.

[1609] In some embodiments, the first polypeptide chain, the second polypeptide chain, the third polypeptide chain, the fourth polypeptide chain, or a combination thereof comprises a light chain constant region of a kappa chain or a fragment thereof.

[1610] In some embodiments, the light chain constant region of a kappa chain comprises a light chain constant region sequence listed in Table 3, 21, or 22.

[1611] In some embodiments, the light chain constant region of the kappa chain comprises a sequence having at least 75% sequence identity to the sequence of SEQ ID NO: 39 or SEQ ID NO: 3644.

[1612] In some embodiments, the first TCRβV-binding moiety, the second TCRβV-binding moiety, or a combination thereof comprises: (i) a HC CDR1, a HC CDR2 and a HC CDR3 comprising amino acid sequences having at least 75% sequence identity to CDR1, CDR2, and CDR3 sequences of a VH disclosed in Tables 1, 2, 10, 11, 12 or 13; (ii) a LC CDR1, a LC CDR2, and a LC CDR3 comprising an amino acid sequence having at least 75% sequence identity to CDR1, CDR2, and CDR3 sequences of a VL disclosed in Tables 1, 2, 10, 11, 12 or 13; or (iii) a combination thereof.

[1613] In some embodiments, the first TCRβV-binding moiety, the second TCRβV-binding moiety, or a combination thereof comprises a light chain comprising a FR1 comprising: (i) an Aspartic Acid at position 1 according to Kabat numbering; (ii) an Asparagine at position 2 according to Kabat numbering; (iii) a Leucine at position 4 according to Kabat numbering; or (iv) a combination thereof.

[1614] In some embodiments, the first TCRβV-binding moiety, the second TCRβV-binding moiety, or a combination thereof comprises a light chain comprising a FR3 comprising: (i) a Glycine at position 66 according to Kabat numbering; (ii) an Asparagine at position 69 according to Kabat numbering; (iii) a Tyrosine at position 71 according to Kabat numbering; or (iv) a combination thereof.

[1615] In some embodiments, the first TCRβV-binding moiety, the second TCRβV-binding moiety, or a combination thereof binds to an outward facing region on a TCRβV protein.

[1616] In some embodiments, the outward facing region on the TCRβV protein comprises a structurally conserved region of TCRβV having a similar structure across one or more TCRβV subfamilies.

[1617] In some embodiments, the first polypeptide chain, the second polypeptide chain, or a combination thereof comprises (i) a first sequence selected from the group consisting of SEQ ID NOS: 80, 83, 86, 89, 92, 95, 98, 101, 104, 107, 110, 110, 113, 116, 119, 122, 125, 128, 131, 134, 137, 140, 143, 146, 149, 153, 156, 159, 162, 165, 168, 171, 174, 177, 180, 183, 186, 189, 192, 195, 198, 201, 204, 206, 208, 210, 212, 214, 216, 218, 220, 222, 224, 1309, 1326, 1327, 1328, 1329, 1330, 1331, 1332, 1333, 1334, 1335, 1336, 1337, 1338, 1339, 1340, 1341, 1342, 3281, and 3642; and (ii) a second sequence selected from the group consisting of SEQ ID NOS: 40, 41, 42, 73, 74, 75, 76, 3645, 3646, 3647, 3648, and 3649; wherein the first sequence is linked to the second sequence.

[1618] In some embodiments, the first polypeptide chain, the second polypeptide chain, or a combination thereof further comprises a third sequence selected from the group consisting of SEQ ID NO: 2191 and SEQ ID NO: 2270, wherein the third sequence is linked to the first sequence, the second sequence, or a combination thereof.

[1619] In some embodiments, the third sequence is linked to the N-terminus of the first sequence.

[1620] In some embodiments, the third sequence is linked to the C-terminus of the second sequence.

[1621] In some embodiments, the first polypeptide chain, the second poly peptide chain, or a combination thereof comprises (i) a first sequence selected from the group consisting of SEQ ID NOS: 1, 9, 15, 23, 25, 82, 85, 88, 91, 94, 97, 100, 103, 106, 109, 112, 115, 118, 121, 124, 127, 130, 133, 136, 139, 142, 145, 148, 151, 155, 158, 161, 164, 167, 170, 173, 176, 179, 182, 185, 188, 191, 194, 197, 200, 203, 205, 207, 209, 211, 213, 215, 217, 219, 221, 223, 225, 1100, 1310, 1311, 1312, 1344, 1346, 1348, 1350, 1356, 1360, 1362, 1370, and 3438; and (ii) a second sequence selected from the group consisting of SEQ ID NOS: 40, 41, 42, 73, 74, 75, 76, 3645, 3646, 3647, 3648, and 3649; wherein the first sequence is linked to the second sequence.

[1622] In some embodiments, the first polypeptide chain, the second polypeptide chain, or a combination thereof further comprises a third sequence selected from the group consisting of SEQ ID NO: 2191 and SEQ ID NO: 2270, wherein the third sequence is linked to the first sequence, the second sequence, or a combination thereof.

[1623] In some embodiments, the third sequence is linked to the N-terminus of the first sequence.

[1624] In some embodiments, the third sequence is linked to the C-terminus of the second sequence.

[1625] In some embodiments, the third polypeptide chain, the fourth polypeptide chain, or a combination thereof comprises (i) a fourth sequence selected from the group consisting of SEQ ID NOS: 2, 10, 11, 16, 26, 27, 28, 29, 30, 81, 84, 87, 90, 93, 96, 99, 102, 105, 108, 111, 114, 117, 120, 123, 126, 129, 132, 135, 138, 141, 144, 147, 150, 154, 157, 160, 163, 166, 169, 172, 175, 178, 181, 184, 187, 190, 193, 196, 199, 202, 1101, 1313, 1314, 1347, 1349, 1351, 1353, 1357, 1361, 1365, 1367, 1369, and 3279; and (ii) a fifth sequence selected from the group consisting of SEQ ID NOS: 39 and 3644, wherein the fourth sequence is linked to the fifth sequence.

[1626] In some embodiments, the third polypeptide chain, the fourth polypeptide chain, or a combination thereof further comprises the third sequence, wherein the third sequence is linked to the fourth sequence, the fifth sequence, or a combination thereof.

[1627] In some embodiments, the third sequence is linked to the N-terminus of the fourth sequence.

[1628] In some embodiments, the third sequence is linked to the C-terminus of the fifth sequence.

[1629] In some embodiments, the first polypeptide chain, the second polypeptide chain, or a combination thereof comprises: a first sequence of SEQ ID NO: 1 linked to a second sequence of SEQ ID NO: 40; a first sequence of SEQ ID NO: 1 linked to a second sequence of SEQ ID NO: 42; a first sequence of SEQ ID NO: 1 linked to a second sequence of SEQ ID NO: 74; a first sequence of SEQ ID NO: 1 linked to a second sequence of SEQ ID NO: 3645; a first sequence of SEQ ID NO: 1 linked to a second sequence of SEQ ID NO: 3646; a first sequence of SEQ ID NO: 1 linked to a second sequence of SEQ ID NO: 3648; a first sequence of SEQ ID NO: 1 linked to a second sequence of SEQ ID NO: 3649; a first sequence of SEQ ID NO: 9 linked to a second sequence of SEQ ID NO: 40; a first sequence of SEQ ID NO: 9 linked to a second sequence of SEQ ID NO. 42; a first sequence of SEQ ID NO. 9 linked to a second sequence of SEQ ID NO: 74; a first sequence of SEQ ID NO: 9 linked to a second sequence of SEQ ID NO: 3645; a first sequence of SEQ ID NO: 9 linked to a second sequence of SEQ ID NO: 3646; a first sequence of SEQ ID NO: 9 linked to a second sequence of SEQ ID NO: 3648; a first sequence of SEQ ID NO: 9 linked to a second sequence of SEQ ID NO: 3649; a first sequence of SEQ ID NO: 25 linked to a second sequence of SEQ ID NO: 40; a first sequence of SEQ ID NO: 25 linked to a second sequence of SEQ ID NO: 42; a first sequence of SEQ ID NO: 25 linked to a second sequence of SEQ ID NO: 74; a first sequence of SEQ ID NO: 25 linked to a second sequence of SEQ ID NO: 3645; a first sequence of SEQ ID NO: 25 linked to a second sequence of SEQ ID NO: 3646; a first sequence of SEQ ID NO: 25 linked to a second sequence of SEQ ID NO: 3648; a first sequence of SEQ ID NO: 25 linked to a second sequence of SEQ ID NO: 3649; a first sequence of SEQ ID NO: 82 linked to a second sequence of SEQ ID NO: 40; a first sequence of SEQ ID NO: 82 linked to a second sequence of SEQ ID NO: 42; a first sequence of SEQ ID NO: 82 linked to a second sequence of SEQ ID NO: 74; a first sequence of SEQ ID NO: 82 linked to a second sequence of SEQ ID NO: 3645; a first sequence of SEQ ID NO: 82 linked to a second sequence of SEQ ID NO: 3646; a first sequence of SEQ ID NO: 82 linked to a second sequence of SEQ ID NO: 3648; a first sequence of SEQ ID NO: 82 linked to a second sequence of SEQ ID NO: 3649; a first sequence of SEQ ID NO: 91 linked to a second sequence of SEQ ID NO: 40; a first sequence of SEQ ID NO: 91 linked to a second sequence of SEQ ID NO: 42; a first sequence of SEQ ID NO: 91 linked to a second sequence of SEQ ID NO: 74, a first sequence of SEQ ID NO: 91 linked to a second sequence of SEQ ID NO: 3645; a first sequence of SEQ ID NO: 91 linked to a second sequence of SEQ ID NO: 3646; a first sequence of SEQ ID NO: 91 linked to a second sequence of SEQ ID NO: 3648; a first sequence of SEQ ID NO: 91 linked to a second sequence of SEQ ID NO: 3649; a first sequence of SEQ ID NO: 103 linked to a second sequence of SEQ ID NO: 40; a first sequence of SEQ ID NO: 103 linked to a second sequence of SEQ ID NO: 42; a first sequence of SEQ ID NO: 103 linked to a second sequence of SEQ ID NO: 74; a first sequence of SEQ ID NO: 103 linked to a second sequence of SEQ ID NO: 3645; a first sequence of SEQ ID NO: 103 linked to a second sequence of SEQ ID NO: 3646; a first sequence of SEQ ID NO: 103 linked to a second sequence of SEQ ID NO: 3648; a first sequence of SEQ ID NO. 103 linked to a second sequence of SEQ ID NO: 3649; a first sequence of SEQ ID NO: 118 linked to a second sequence of SEQ ID NO: 40; a first sequence of SEQ ID NO: 118 linked to a second sequence of SEQ ID NO: 42; a first sequence of SEQ ID NO: 118 linked to a second sequence of SEQ ID NO: 74; a first sequence of SEQ ID NO: 118 linked to a second sequence of SEQ ID NO: 3645; a first sequence of SEQ ID NO: 118 linked to a second sequence of SEQ ID NO: 3646; a first sequence of SEQ ID NO: 118 linked to a second sequence of SEQ ID NO: 3648; a first sequence of SEQ ID NO: 118 linked to a second sequence of SEQ ID NO: 3649; a first sequence of SEQ ID NO: 130 linked to a second sequence of SEQ ID NO: 40; a first sequence of SEQ ID NO: 130 linked to a second sequence of SEQ ID NO: 42; a first sequence of SEQ ID NO: 130 linked to a second sequence of SEQ ID NO: 74; a first sequence of SEQ ID NO: 130 linked to a second sequence of SEQ ID NO: 3645; a first sequence of SEQ ID NO: 130 linked to a second sequence of SEQ ID NO: 3646; a first sequence of SEQ ID NO. 130 linked to a second sequence of SEQ ID NO: 3648; a first sequence of SEQ ID NO: 130 linked to a second sequence of SEQ ID NO: 3649; a first sequence of SEQ ID NO: 142 linked to a second sequence of SEQ ID NO: 40; a first sequence of SEQ ID NO. 142 linked to a second sequence of SEQ ID NO: 42; a first sequence of SEQ ID NO: 142 linked to a second sequence of SEQ ID NO: 74; a first sequence of SEQ ID NO: 142 linked to a second sequence of SEQ ID NO: 3645; a first sequence of SEQ ID NO: 142 linked to a second sequence of SEQ ID NO: 3646; a first sequence of SEQ ID NO: 142 linked to a second sequence of SEQ ID NO: 3648; a first sequence of SEQ ID NO: 142 linked to a second sequence of SEQ ID NO: 3649; a first sequence of SEQ ID NO: 151 linked to a second sequence of SEQ ID NO: 40: a first sequence of SEQ ID NO: 151 linked to a second sequence of SEQ ID NO: 42; a first sequence of SEQ ID NO: 151 linked to a second sequence of SEQ ID NO: 74; a first sequence of SEQ ID NO: 151 linked to a second sequence of SEQ ID NO: 3645; a first sequence of SEQ ID NO: 151 linked to a second sequence of SEQ ID NO: 3646; a first sequence of SEQ ID NO: 151 linked to a second sequence of SEQ ID NO: 3648: a first sequence of SEQ ID NO: 151 linked to a second sequence of SEQ ID NO: 3649; a first sequence of SEQ ID NO: 167 linked to a second sequence of SEQ ID NO: 40; a first sequence of SEQ ID NO: 167 linked to a second sequence of SEQ ID NO: 42; a first sequence of SEQ ID NO: 167 linked to a second sequence of SEQ ID NO: 74; a first sequence of SEQ ID NO: 167 linked to a second sequence of SEQ ID NO: 3645; a first sequence of SEQ ID NO: 167 linked to a second sequence of SEQ ID NO: 3646; a first sequence of SEQ ID NO: 167 linked to a second sequence of SEQ ID NO: 3648; a first sequence of SEQ ID NO: 167 linked to a second sequence of SEQ ID NO: 3649; a first sequence of SEQ ID NO: 182 linked to a second sequence of SEQ ID NO: 40; a first sequence of SEQ ID NO. 182 linked to a second sequence of SEQ ID NO: 42; a first sequence of SEQ ID NO: 182 linked to a second sequence of SEQ ID NO: 74; a first sequence of SEQ ID NO: 182 linked to a second sequence of SEQ ID NO: 3645; a first sequence of SEQ ID NO: 182 linked to a second sequence of SEQ ID NO: 3646; a first sequence of SEQ ID NO: 182 linked to a second sequence of SEQ ID NO: 3648; a first sequence of SEQ ID NO: 182 linked to a second sequence of SEQ ID NO: 3649; a first sequence of SEQ ID NO: 197 linked to a second sequence of SEQ ID NO: 40; a first sequence of SEQ ID NO: 197 linked to a second sequence of SEQ ID NO: 42; a first sequence of SEQ ID NO: 197 linked to a second sequence of SEQ ID NO: 74; a first sequence of SEQ ID NO: 197 linked to a second sequence of SEQ ID NO: 3645; a first sequence of SEQ ID NO: 197 linked to a second sequence of SEQ ID NO: 3646; a first sequence of SEQ ID NO: 197 linked to a second sequence of SEQ ID NO: 3648; a first sequence of SEQ ID NO: 197 linked to a second sequence of SEQ ID NO: 3649; a first sequence of SEQ ID NO: 203 linked to a second sequence of SEQ ID NO: 40; a first sequence of SEQ ID NO: 203 linked to a second sequence of SEQ ID NO: 42; a first sequence of SEQ ID NO: 203 linked to a second sequence of SEQ ID NO: 74; a first sequence of SEQ ID NO. 203 linked to a second sequence of SEQ ID NO: 3645; a first sequence of SEQ ID NO: 203 linked to a second sequence of SEQ ID NO: 3646; a first sequence of SEQ ID NO: 203 linked to a second sequence of SEQ ID NO: 3648; a first sequence of SEQ ID NO: 203 linked to a second sequence of SEQ ID NO: 3649; a first sequence of SEQ ID NO: 209 linked to a second sequence of SEQ ID NO: 40: a first sequence of SEQ ID NO: 209 linked to a second sequence of SEQ ID NO. 42; a first sequence of SEQ ID NO: 209 linked to a second sequence of SEQ ID NO: 74; a first sequence of SEQ ID NO: 209 linked to a second sequence of SEQ ID NO: 3645; a first sequence of SEQ ID NO: 209 linked to a second sequence of SEQ ID NO: 3646; a first sequence of SEQ ID NO: 209 linked to a second sequence of SEQ ID NO: 3648; a first sequence of SEQ ID NO: 209 linked to a second sequence of SEQ ID NO: 3649; a first sequence of SEQ ID NO: 215 linked to a second sequence of SEQ ID NO: 40; a first sequence of SEQ ID NO: 215 linked to a second sequence of SEQ ID NO: 42; a first sequence of SEQ ID NO: 215 linked to a second sequence of SEQ ID NO: 74; a first sequence of SEQ ID NO: 215 linked to a second sequence of SEQ ID NO: 3645; a first sequence of SEQ ID NO: 215 linked to a second sequence of SEQ ID NO: 3646; a first sequence of SEQ ID NO: 215 linked to a second sequence of SEQ ID NO: 3648; a first sequence of SEQ ID NO: 215 linked to a second sequence of SEQ ID NO: 3649; a first sequence of SEQ ID NO: 221 linked to a second sequence of SEQ ID NO: 40; a first sequence of SEQ ID NO: 221 linked to a second sequence of SEQ ID NO: 42; a first sequence of SEQ ID NO: 221 linked to a second sequence of SEQ ID NO: 74; a first sequence of SEQ ID NO: 221 linked to a second sequence of SEQ ID NO: 3645; a first sequence of SEQ ID NO. 221 linked to a second sequence of SEQ ID NO: 3646; a first sequence of SEQ ID NO: 221 linked to a second sequence of SEQ ID NO: 3648; a first sequence of SEQ ID NO: 221 linked to a second sequence of SEQ ID NO: 3649; a first sequence of SEQ ID NO: 1100 linked to a second sequence of SEQ ID NO: 40; a first sequence of SEQ ID NO: 1100 linked to a second sequence of SEQ ID NO: 42, a first sequence of SEQ ID NO: 1100 linked to a second sequence of SEQ ID NO: 74; a first sequence of SEQ ID NO: 1100 linked to a second sequence of SEQ ID NO: 3645; a first sequence of SEQ ID NO: 1100 linked to a second sequence of SEQ ID NO: 3646; a first sequence of SEQ ID NO: 1100 linked to a second sequence of SEQ ID NO: 3648; a first sequence of SEQ ID NO: 1100 linked to a second sequence of SEQ ID NO: 3649; a first sequence of SEQ ID NO: 1310 linked to a second sequence of SEQ ID NO. 40; a first sequence of SEQ ID NO. 1310 linked to a second sequence of SEQ ID NO: 42; a first sequence of SEQ ID NO: 1310 linked to a second sequence of SEQ ID NO: 74; a first sequence of SEQ ID NO: 1310 linked to a second sequence of SEQ ID NO: 3645; a first sequence of SEQ ID NO: 1310 linked to a second sequence of SEQ ID NO: 3646; a first sequence of SEQ ID NO: 1310 linked to a second sequence of SEQ ID NO: 3648; a first sequence of SEQ ID NO: 1310 linked to a second sequence of SEQ ID NO: 3649; a first sequence of SEQ ID NO: 1346 linked to a second sequence of SEQ ID NO: 40; a first sequence of SEQ ID NO: 1346 linked to a second sequence of SEQ ID NO: 42; a first sequence of SEQ ID NO: 1346 linked to a second sequence of SEQ ID NO: 74; a first sequence of SEQ ID NO: 1346 linked to a second sequence of SEQ ID NO: 3645; a first sequence of SEQ ID NO. 1346 linked to a second sequence of SEQ ID NO: 3646; a first sequence of SEQ ID NO: 1346 linked to a second sequence of SEQ ID NO: 3648; a first sequence of SEQ ID NO: 1346 linked to a second sequence of SEQ ID NO: 3649; a first sequence of SEQ ID NO: 1350 linked to a second sequence of SEQ ID NO: 40; a first sequence of SEQ ID NO: 1350 linked to a second sequence of SEQ ID NO: 42, a first sequence of SEQ ID NO: 1350 linked to a second sequence of SEQ ID NO: 74; a first sequence of SEQ ID NO: 1350 linked to a second sequence of SEQ ID NO: 3645; a first sequence of SEQ ID NO: 1350 linked to a second sequence of SEQ ID NO: 3646; a first sequence of SEQ ID NO: 1350 linked to a second sequence of SEQ ID NO: 3648; a first sequence of SEQ ID NO: 1350 linked to a second sequence of SEQ ID NO: 3649; a first sequence of SEQ ID NO: 1360 linked to a second sequence of SEQ ID NO: 40; a first sequence of SEQ ID NO: 1360 linked to a second sequence of SEQ ID NO: 42; a first sequence of SEQ ID NO: 1360 linked to a second sequence of SEQ ID NO: 74; a first sequence of SEQ ID NO: 1360 linked to a second sequence of SEQ ID NO: 3645; a first sequence of SEQ ID NO: 1360 linked to a second sequence of SEQ ID NO: 3646; a first sequence of SEQ ID NO: 1360 linked to a second sequence of SEQ ID NO: 3648; a first sequence of SEQ ID NO: 1360 linked to a second sequence of SEQ ID NO: 3649; a first sequence of SEQ ID NO: 1370 linked to a second sequence of SEQ ID NO: 40; a first sequence of SEQ ID NO: 1370 linked to a second sequence of SEQ ID NO: 42; a first sequence of SEQ ID NO: 1370 linked to a second sequence of SEQ ID NO: 74; a first sequence of SEQ ID NO: 1370 linked to a second sequence of SEQ ID NO: 3645; a first sequence of SEQ ID NO. 1370 linked to a second sequence of SEQ ID NO: 3646; a first sequence of SEQ ID NO: 1370 linked to a second sequence of SEQ ID NO: 3648; or a first sequence of SEQ ID NO: 1370 linked to a second sequence of SEQ ID NO: 3649.

[1630] In some embodiments, the first polypeptide chain, the second polypeptide chain, or a combination thereof further comprises a third sequence selected from the group consisting of SEQ ID NO: 2191 and SEQ ID NO: 2270, wherein the third sequence is linked to the first sequence, the second sequence, or a combination thereof.

[1631] In some embodiments, the third sequence is linked to the N-terminus of the first sequence.

[1632] In some embodiments, the third sequence is linked to the C-terminus of the second sequence.

[1633] In some embodiments, the third polypeptide chain, the fourth polypeptide chain, or a combination thereof comprises: a fourth sequence of SEQ ID NO: 2 linked to a fifth sequence of SEQ ID NO: 3644: a fourth sequence of SEQ ID NO: 2 linked to a fifth sequence of SEQ ID NO: 39: a fourth sequence of SEQ ID NO: 10 linked to a fifth sequence of SEQ ID NO: 3644; a fourth sequence of SEQ ID NO: 10 linked to a fifth sequence of SEQ ID NO: 39: a fourth sequence of SEQ ID NO: 16 linked to a fifth sequence of SEQ ID NO: 3644; a fourth sequence of SEQ ID NO: 16 linked to a fifth sequence of SEQ ID NO: 39: a fourth sequence of SEQ ID NO: 28 linked to a fifth sequence of SEQ ID NO: 3644: a fourth sequence of SEQ ID NO: 28 linked to a fifth sequence of SEQ ID NO: 39, a fourth sequence of SEQ ID NO: 87 linked to a fifth sequence of SEQ ID NO: 3644; a fourth sequence of SEQ ID NO: 87 linked to a fifth sequence of SEQ ID NO: 39: a fourth sequence of SEQ ID NO: 90 linked to a fifth sequence of SEQ ID NO: 3644; a fourth sequence of SEQ ID NO: 90 linked to a fifth sequence of SEQ ID NO: 39: a fourth sequence of SEQ ID NO: 96 linked to a fifth sequence of SEQ ID NO: 3644, a fourth sequence of SEQ ID NO. 96 linked to a fifth sequence of SEQ ID NO: 39: a fourth sequence of SEQ ID NO: 105 linked to a fifth sequence of SEQ ID NO: 3644: a fourth sequence of SEQ ID NO: 105 linked to a fifth sequence of SEQ ID NO: 39: a fourth sequence of SEQ ID NO 117 linked to a fifth sequence of SEQ ID NO: 3644; a fourth sequence of SEQ ID NO: 117 linked to a fifth sequence of SEQ ID NO: 39: a fourth sequence of SEQ ID NO: 120 linked to a fifth sequence of SEQ ID NO: 3644: a fourth sequence of SEQ ID NO: 120 linked to a fifth sequence of SEQ ID NO: 39; a fourth sequence of SEQ ID NO: 129 linked to a fifth sequence of SEQ ID NO: 3644: a fourth sequence of SEQ ID NO: 129 linked to a fifth sequence of SEQ ID NO: 39; a fourth sequence of SEQ ID NO: 132 linked to a fifth sequence of SEQ ID NO: 3644: a fourth sequence of SEQ ID NO: 132 linked to a fifth sequence of SEQ ID NO: 39: a fourth sequence of SEQ ID NO: 141 linked to a fifth sequence of SEQ ID NO: 3644: a fourth sequence of SEQ ID NO: 141 linked to a fifth sequence of SEQ ID NO: 39: a fourth sequence of SEQ ID NO: 150 linked to a fifth sequence of SEQ ID NO: 3644: a fourth sequence of SEQ ID NO: 150 linked to a fifth sequence of SEQ ID NO: 39: a fourth sequence of SEQ ID NO: 154 linked to a fifth sequence of SEQ ID NO: 3644; a fourth sequence of SEQ ID NO: 154 linked to a fifth sequence of SEQ ID NO: 39: a fourth sequence of SEQ ID NO: 163 linked to a fifth sequence of SEQ ID NO: 3644; a fourth sequence of SEQ ID NO: 163 linked to a fifth sequence of SEQ ID NO: 39: a fourth sequence of SEQ ID NO: 169 linked to a fifth sequence of SEQ ID NO: 3644: a fourth sequence of SEQ ID NO: 169 linked to a fifth sequence of SEQ ID NO: 39; a fourth sequence of SEQ ID NO: 175 linked to a fifth sequence of SEQ ID NO: 3644: a fourth sequence of SEQ ID NO: 175 linked to a fifth sequence of SEQ ID NO: 39; a fourth sequence of SEQ ID NO: 181 linked to a fifth sequence of SEQ ID NO: 3644: a fourth sequence of SEQ ID NO. 181 linked to a fifth sequence of SEQ ID NO: 39; a fourth sequence of SEQ ID NO: 187 linked to a fifth sequence of SEQ ID NO: 3644; a fourth sequence of SEQ ID NO. 187 linked to a fifth sequence of SEQ ID NO: 39; a fourth sequence of SEQ ID NO: 193 linked to a fifth sequence of SEQ ID NO. 3644: a fourth sequence of SEQ ID NO: 193 linked to a fifth sequence of SEQ ID NO: 39; a fourth sequence of SEQ ID NO: 202 linked to a fifth sequence of SEQ ID NO: 3644; a fourth sequence of SEQ ID NO: 202 linked to a fifth sequence of SEQ ID NO: 39; a fourth sequence of SEQ ID NO: 1101 linked to a fifth sequence of SEQ ID NO: 3644: a fourth sequence of SEQ ID NO: 1101 linked to a fifth sequence of SEQ ID NO: 39: a fourth sequence of SEQ ID NO: 1349 linked to a fifth sequence of SEQ ID NO: 3644: a fourth sequence of SEQ ID NO: 1349 linked to a fifth sequence of SEQ ID NO: 39; a fourth sequence of SEQ ID NO: 1313 linked to a fifth sequence of SEQ ID NO: 3644; a fourth sequence of SEQ ID NO: 1313 linked to a fifth sequence of SEQ ID NO: 39: a fourth sequence of SEQ ID NO: 1361 linked to a fifth sequence of SEQ ID NO: 3644: a fourth sequence of SEQ ID NO: 1361 linked to a fifth sequence of SEQ ID NO: 39; a fourth sequence of SEQ ID NO: 1367 linked to a fifth sequence of SEQ ID NO: 3644; a fourth sequence of SEQ ID NO: 1367 linked to a fifth sequence of SEQ ID NO: 39: a fourth sequence of SEQ ID NO: 1367 linked to a fifth sequence of SEQ ID NO: 3644: a fourth sequence of SEQ ID NO: 1367 linked to a fifth sequence of SEQ ID NO: 39; a fourth sequence of SEQ ID NO: 3279 linked to a fifth sequence of SEQ ID NO: 3644; or a fourth sequence of SEQ ID NO: 3279 linked to a fifth sequence of SEQ ID NO: 39.

[1634] In some embodiments, the third polypeptide chain, the fourth polypeptide chain, or a combination thereof further comprises the third sequence, wherein the third sequence is linked to the fourth sequence, the fifth sequence, or a combination thereof.

[1635] In some embodiments, the third sequence is linked to the N-terminus of the fourth sequence.

[1636] In some embodiments, the third sequence is linked to the C-terminus of the fifth sequence.

[1637] In some embodiments, the first polypeptide chain comprises: a first sequence of SEQ ID NO: 1 linked to a second sequence of SEQ ID NO: 40; a first sequence of SEQ ID NO: 1 linked to a second sequence of SEQ ID NO: 42; a first sequence of SEQ ID NO: 1 linked to a second sequence of SEQ ID NO: 74; a first sequence of SEQ ID NO: 1 linked to a second sequence of SEQ ID NO: 3645; a first sequence of SEQ ID NO: 1 linked to a second sequence of SEQ ID NO: 3646; a first sequence of SEQ ID NO: 1 linked to a second sequence of SEQ ID NO: 3648; a first sequence of SEQ ID NO: 1 linked to a second sequence of SEQ ID NO: 3649; a first sequence of SEQ ID NO: 9 linked to a second sequence of SEQ ID NO: 40; a first sequence of SEQ ID NO: 9 linked to a second sequence of SEQ ID NO: 42; a first sequence of SEQ ID NO: 9 linked to a second sequence of SEQ ID NO: 74; a first sequence of SEQ ID NO: 9 linked to a second sequence of SEQ ID NO: 3645; a first sequence of SEQ ID NO: 9 linked to a second sequence of SEQ ID NO: 3646; a first sequence of SEQ ID NO: 9 linked to a second sequence of SEQ ID NO: 3648; a first sequence of SEQ ID NO: 9 linked to a second sequence of SEQ ID NO: 3649; a first sequence of SEQ ID NO: 25 linked to a second sequence of SEQ ID NO: 40; a first sequence of SEQ ID NO: 25 linked to a second sequence of SEQ ID NO. 42; a first sequence of SEQ ID NO. 25 linked to a second sequence of SEQ ID NO: 74; a first sequence of SEQ ID NO: 25 linked to a second sequence of SEQ ID NO: 3645; a first sequence of SEQ ID NO: 25 linked to a second sequence of SEQ ID NO: 3646; a first sequence of SEQ ID NO: 25 linked to a second sequence of SEQ ID NO: 3648; a first sequence of SEQ ID NO: 25 linked to a second sequence of SEQ ID NO: 3649; a first sequence of SEQ ID NO: 82 linked to a second sequence of SEQ ID NO: 40; a first sequence of SEQ ID NO: 82 linked to a second sequence of SEQ ID NO: 42, a first sequence of SEQ ID NO: 82 linked to a second sequence of SEQ ID NO: 74; a first sequence of SEQ ID NO: 82 linked to a second sequence of SEQ ID NO: 3645; a first sequence of SEQ ID NO: 82 linked to a second sequence of SEQ ID NO: 3646; a first sequence of SEQ ID NO: 82 linked to a second sequence of SEQ ID NO: 3648; a first sequence of SEQ ID NO. 82 linked to a second sequence of SEQ ID NO: 3649; a first sequence of SEQ ID NO: 91 linked to a second sequence of SEQ ID NO: 40; a first sequence of SEQ ID NO: 91 linked to a second sequence of SEQ ID NO: 42; a first sequence of SEQ ID NO: 91 linked to a second sequence of SEQ ID NO: 74; a first sequence of SEQ ID NO: 91 linked to a second sequence of SEQ ID NO: 3645; a first sequence of SEQ ID NO: 91 linked to a second sequence of SEQ ID NO: 3646; a first sequence of SEQ ID NO: 91 linked to a second sequence of SEQ ID NO: 3648; a first sequence of SEQ ID NO: 91 linked to a second sequence of SEQ ID NO: 3649; a first sequence of SEQ ID NO: 103 linked to a second sequence of SEQ ID NO: 40: a first sequence of SEQ ID NO: 103 linked to a second sequence of SEQ ID NO: 42; a first sequence of SEQ ID NO: 103 linked to a second sequence of SEQ ID NO: 74; a first sequence of SEQ ID NO: 103 linked to a second sequence of SEQ ID NO: 3645; a first sequence of SEQ ID NO: 103 linked to a second sequence of SEQ ID NO: 3646; a first sequence of SEQ ID NO: 103 linked to a second sequence of SEQ ID NO: 3648; a first sequence of SEQ ID NO: 103 linked to a second sequence of SEQ ID NO: 3649; a first sequence of SEQ ID NO: 118 linked to a second sequence of SEQ ID NO: 40; a first sequence of SEQ ID NO: 118 linked to a second sequence of SEQ ID NO: 42; a first sequence of SEQ ID NO: 118 linked to a second sequence of SEQ ID NO: 74; a first sequence of SEQ ID NO: 118 linked to a second sequence of SEQ ID NO: 3645; a first sequence of SEQ ID NO: 118 linked to a second sequence of SEQ ID NO: 3646; a first sequence of SEQ ID NO: 118 linked to a second sequence of SEQ ID NO: 3648; a first sequence of SEQ ID NO: 118 linked to a second sequence of SEQ ID NO: 3649; a first sequence of SEQ ID NO: 130 linked to a second sequence of SEQ ID NO: 40; a first sequence of SEQ ID NO: 130 linked to a second sequence of SEQ ID NO: 42; a first sequence of SEQ ID NO. 130 linked to a second sequence of SEQ ID NO: 74; a first sequence of SEQ ID NO: 130 linked to a second sequence of SEQ ID NO: 3645; a first sequence of SEQ ID NO: 130 linked to a second sequence of SEQ ID NO: 3646; a first sequence of SEQ ID NO: 130 linked to a second sequence of SEQ ID NO: 3648; a first sequence of SEQ ID NO: 130 linked to a second sequence of SEQ ID NO: 3649: a first sequence of SEQ ID NO: 142 linked to a second sequence of SEQ ID NO. 40; a first sequence of SEQ ID NO: 142 linked to a second sequence of SEQ ID NO: 42; a first sequence of SEQ ID NO: 142 linked to a second sequence of SEQ ID NO: 74; a first sequence of SEQ ID NO: 142 linked to a second sequence of SEQ ID NO: 3645; a first sequence of SEQ ID NO. 142 linked to a second sequence of SEQ ID NO: 3646; a first sequence of SEQ ID NO: 142 linked to a second sequence of SEQ ID NO: 3648; a first sequence of SEQ ID NO: 142 linked to a second sequence of SEQ ID NO: 3649; a first sequence of SEQ ID NO: 151 linked to a second sequence of SEQ ID NO: 40; a first sequence of SEQ ID NO: 151 linked to a second sequence of SEQ ID NO: 42; a first sequence of SEQ ID NO: 151 linked to a second sequence of SEQ ID NO: 74; a first sequence of SEQ ID NO: 151 linked to a second sequence of SEQ ID NO: 3645; a first sequence of SEQ ID NO: 151 linked to a second sequence of SEQ ID NO: 3646; a first sequence of SEQ ID NO: 151 linked to a second sequence of SEQ ID NO: 3648; a first sequence of SEQ ID NO: 151 linked to a second sequence of SEQ ID NO: 3649; a first sequence of SEQ ID NO: 167 linked to a second sequence of SEQ ID NO. 40; a first sequence of SEQ ID NO: 167 linked to a second sequence of SEQ ID NO: 42; a first sequence of SEQ ID NO: 167 linked to a second sequence of SEQ ID NO: 74; a first sequence of SEQ ID NO: 167 linked to a second sequence of SEQ ID NO: 3645; a first sequence of SEQ ID NO: 167 linked to a second sequence of SEQ ID NO: 3646; a first sequence of SEQ ID NO: 167 linked to a second sequence of SEQ ID NO: 3648: a first sequence of SEQ ID NO: 167 linked to a second sequence of SEQ ID NO: 3649; a first sequence of SEQ ID NO: 182 linked to a second sequence of SEQ ID NO: 40; a first sequence of SEQ ID NO: 182 linked to a second sequence of SEQ ID NO: 42; a first sequence of SEQ ID NO: 182 linked to a second sequence of SEQ ID NO: 74; a first sequence of SEQ ID NO: 182 linked to a second sequence of SEQ ID NO: 3645; a first sequence of SEQ ID NO: 182 linked to a second sequence of SEQ ID NO: 3646; a first sequence of SEQ ID NO: 182 linked to a second sequence of SEQ ID NO: 3648; a first sequence of SEQ ID NO: 182 linked to a second sequence of SEQ ID NO: 3649; a first sequence of SEQ ID NO: 197 linked to a second sequence of SEQ ID NO: 40; a first sequence of SEQ ID NO: 197 linked to a second sequence of SEQ ID NO: 42; a first sequence of SEQ ID NO: 197 linked to a second sequence of SEQ ID NO: 74; a first sequence of SEQ ID NO: 197 linked to a second sequence of SEQ ID NO: 3645; a first sequence of SEQ ID NO: 197 linked to a second sequence of SEQ ID NO: 3646; a first sequence of SEQ ID NO: 197 linked to a second sequence of SEQ ID NO: 3648; a first sequence of SEQ ID NO: 197 linked to a second sequence of SEQ ID NO: 3649; a first sequence of SEQ ID NO: 203 linked to a second sequence of SEQ ID NO: 40; a first sequence of SEQ ID NO: 203 linked to a second sequence of SEQ ID NO: 42; a first sequence of SEQ ID NO: 203 linked to a second sequence of SEQ ID NO: 74; a first sequence of SEQ ID NO: 203 linked to a second sequence of SEQ ID NO: 3645; a first sequence of SEQ ID NO: 203 linked to a second sequence of SEQ ID NO: 3646; a first sequence of SEQ ID NO: 203 linked to a second sequence of SEQ ID NO: 3648; a first sequence of SEQ ID NO: 203 linked to a second sequence of SEQ ID NO: 3649; a first sequence of SEQ ID NO: 209 linked to a second sequence of SEQ ID NO: 40; a first sequence of SEQ ID NO. 209 linked to a second sequence of SEQ ID NO: 42; a first sequence of SEQ ID NO: 209 linked to a second sequence of SEQ ID NO: 74; a first sequence of SEQ ID NO. 209 linked to a second sequence of SEQ ID NO: 3645; a first sequence of SEQ ID NO: 209 linked to a second sequence of SEQ ID NO: 3646; a first sequence of SEQ ID NO. 209 linked to a second sequence of SEQ ID NO: 3648; a first sequence of SEQ ID NO: 209 linked to a second sequence of SEQ ID NO: 3649; a first sequence of SEQ ID NO: 215 linked to a second sequence of SEQ ID NO: 40: a first sequence of SEQ ID NO: 215 linked to a second sequence of SEQ ID NO: 42; a first sequence of SEQ ID NO: 215 linked to a second sequence of SEQ ID NO: 74; a first sequence of SEQ ID NO: 215 linked to a second sequence of SEQ ID NO: 3645; a first sequence of SEQ ID NO: 215 linked to a second sequence of SEQ ID NO: 3646; a first sequence of SEQ ID NO: 215 linked to a second sequence of SEQ ID NO: 3648; a first sequence of SEQ ID NO: 215 linked to a second sequence of SEQ ID NO: 3649; a first sequence of SEQ ID NO: 221 linked to a second sequence of SEQ ID NO: 40; a first sequence of SEQ ID NO: 221 linked to a second sequence of SEQ ID NO: 42; a first sequence of SEQ ID NO: 221 linked to a second sequence of SEQ ID NO: 74; a first sequence of SEQ ID NO: 221 linked to a second sequence of SEQ ID NO: 3645; a first sequence of SEQ ID NO: 221 linked to a second sequence of SEQ ID NO: 3646; a first sequence of SEQ ID NO: 221 linked to a second sequence of SEQ ID NO: 3648; a first sequence of SEQ ID NO: 221 linked to a second sequence of SEQ ID NO: 3649; a first sequence of SEQ ID NO: 1100 linked to a second sequence of SEQ ID NO: 40; a first sequence of SEQ ID NO: 1100 linked to a second sequence of SEQ ID NO: 42; a first sequence of SEQ ID NO: 1100 linked to a second sequence of SEQ ID NO: 74; a first sequence of SEQ ID NO: 1100 linked to a second sequence of SEQ ID NO: 3645; a first sequence of SEQ ID NO: 1100 linked to a second sequence of SEQ ID NO: 3646; a first sequence of SEQ ID NO: 1100 linked to a second sequence of SEQ ID NO: 3648; a first sequence of SEQ ID NO: 1100 linked to a second sequence of SEQ ID NO: 3649; a first sequence of SEQ ID NO: 1310 linked to a second sequence of SEQ ID NO: 40; a first sequence of SEQ ID NO: 1310 linked to a second sequence of SEQ ID NO: 42; a first sequence of SEQ ID NO: 1310 linked to a second sequence of SEQ ID NO: 74; a first sequence of SEQ ID NO: 1310 linked to a second sequence of SEQ ID NO: 3645; a first sequence of SEQ ID NO: 1310 linked to a second sequence of SEQ ID NO: 3646; a first sequence of SEQ ID NO: 1310 linked to a second sequence of SEQ ID NO: 3648; a first sequence of SEQ ID NO: 1310 linked to a second sequence of SEQ ID NO: 3649; a first sequence of SEQ ID NO: 1346 linked to a second sequence of SEQ ID NO. 40; a first sequence of SEQ ID NO. 1346 linked to a second sequence of SEQ ID NO: 42; a first sequence of SEQ ID NO: 1346 linked to a second sequence of SEQ ID NO: 74; a first sequence of SEQ ID NO: 1346 linked to a second sequence of SEQ ID NO: 3645; a first sequence of SEQ ID NO: 1346 linked to a second sequence of SEQ ID NO: 3646; a first sequence of SEQ ID NO: 1346 linked to a second sequence of SEQ ID NO: 3648; a first sequence of SEQ ID NO: 1346 linked to a second sequence of SEQ ID NO: 3649; a first sequence of SEQ ID NO: 1350 linked to a second sequence of SEQ ID NO: 40; a first sequence of SEQ ID NO. 1350 linked to a second sequence of SEQ ID NO: 42; a first sequence of SEQ ID NO: 1350 linked to a second sequence of SEQ ID NO: 74; a first sequence of SEQ ID NO: 1350 linked to a second sequence of SEQ ID NO: 3645; a first sequence of SEQ ID NO. 1350 linked to a second sequence of SEQ ID NO: 3646; a first sequence of SEQ ID NO: 1350 linked to a second sequence of SEQ ID NO: 3648; a first sequence of SEQ ID NO: 1350 linked to a second sequence of SEQ ID NO: 3649; a first sequence of SEQ ID NO: 1360 linked to a second sequence of SEQ ID NO: 40; a first sequence of SEQ ID NO: 1360 linked to a second sequence of SEQ ID NO: 42; a first sequence of SEQ ID NO: 1360 linked to a second sequence of SEQ ID NO: 74; a first sequence of SEQ ID NO. 1360 linked to a second sequence of SEQ ID NO: 3645; a first sequence of SEQ ID NO: 1360 linked to a second sequence of SEQ ID NO: 3646; a first sequence of SEQ ID NO: 1360 linked to a second sequence of SEQ ID NO: 3648; a first sequence of SEQ ID NO: 1360 linked to a second sequence of SEQ ID NO: 3649; a first sequence of SEQ ID NO: 1370 linked to a second sequence of SEQ ID NO. 40; a first sequence of SEQ ID NO. 1370 linked to a second sequence of SEQ ID NO: 42; a first sequence of SEQ ID NO: 1370 linked to a second sequence of SEQ ID NO: 74; a first sequence of SEQ ID NO: 1370 linked to a second sequence of SEQ ID NO: 3645; a first sequence of SEQ ID NO: 1370 linked to a second sequence of SEQ ID NO: 3646; a first sequence of SEQ ID NO: 1370 linked to a second sequence of SEQ ID NO: 3648; or a first sequence of SEQ ID NO: 1370 linked to a second sequence of SEQ ID NO: 3649.

[1638] In some embodiments, the second polypeptide chain comprises the sequence of SEQ ID NO: 2191 linked to the sequence of SEQ ID NO: 40; the sequence of SEQ ID NO: 2191 linked to the sequence of SEQ ID NO: 42; the sequence of SEQ ID NO: 2191 linked to the sequence of SEQ ID NO: 74; the sequence of SEQ ID NO: 2191 linked to the sequence of SEQ ID NO: 3645; the sequence of SEQ ID NO: 2191 linked to the sequence of SEQ ID NO: 3646; the sequence of SEQ ID NO: 2191 linked to the sequence of SEQ ID NO: 3648; the sequence of SEQ ID NO: 2191 linked to the sequence of SEQ ID NO: 3649; the sequence of SEQ ID NO: 2270 linked to the sequence of SEQ ID NO: 40; the sequence of SEQ ID NO: 2270 linked to the sequence of SEQ ID NO: 42; the sequence of SEQ ID NO: 2270 linked to the sequence of SEQ ID NO: 74; the sequence of SEQ ID NO. 2270 linked to the sequence of SEQ ID NO: 3645; the sequence of SEQ ID NO: 2270 linked to the sequence of SEQ ID NO: 3646; the sequence of SEQ ID NO: 2270 linked to the sequence of SEQ ID NO: 3648; or the sequence of SEQ ID NO: 2270 linked to the sequence of SEQ ID NO: 3649.

[1639] In some embodiments, the third polypeptide chain comprises: a fourth sequence of SEQ ID NO: 2 linked to a fifth sequence of SEQ ID NO: 3644; a fourth sequence of SEQ ID NO: 2 linked to a fifth sequence of SEQ ID NO: 39; a fourth sequence of SEQ ID NO: 10 linked to a fifth sequence of SEQ ID NO: 3644; a fourth sequence of SEQ ID NO: 10 linked to a fifth sequence of SEQ ID NO: 39; a fourth sequence of SEQ ID NO: 16 linked to a fifth sequence of SEQ ID NO: 3644, a fourth sequence of SEQ ID NO. 16 linked to a fifth sequence of SEQ ID NO: 39; a fourth sequence of SEQ ID NO: 28 linked to a fifth sequence of SEQ ID NO: 3644; a fourth sequence of SEQ ID NO: 28 linked to a fifth sequence of SEQ ID NO: 39; a fourth sequence of SEQ ID NO: 87 linked to a fifth sequence of SEQ ID NO: 3644; a fourth sequence of SEQ ID NO: 87 linked to a fifth sequence of SEQ ID NO: 39: a fourth sequence of SEQ ID NO: 90 linked to a fifth sequence of SEQ ID NO. 3644; a fourth sequence of SEQ ID NO: 90 linked to a fifth sequence of SEQ ID NO: 39; a fourth sequence of SEQ ID NO: 96 linked to a fifth sequence of SEQ ID NO: 3644: a fourth sequence of SEQ ID NO: 96 linked to a fifth sequence of SEQ ID NO: 39: a fourth sequence of SEQ ID NO: 105 linked to a fifth sequence of SEQ ID NO: 3644: a fourth sequence of SEQ ID NO: 105 linked to a fifth sequence of SEQ ID NO: 39: a fourth sequence of SEQ ID NO: 117 linked to a fifth sequence of SEQ ID NO. 3644; a fourth sequence of SEQ ID NO: 117 linked to a fifth sequence of SEQ ID NO: 39: a fourth sequence of SEQ ID NO: 120 linked to a fifth sequence of SEQ ID NO: 3644: a fourth sequence of SEQ ID NO: 120 linked to a fifth sequence of SEQ ID NO: 39: a fourth sequence of SEQ ID NO: 129 linked to a fifth sequence of SEQ ID NO: 3644: a fourth sequence of SEQ ID NO: 129 linked to a fifth sequence of SEQ ID NO: 39; a fourth sequence of SEQ ID NO: 132 linked to a fifth sequence of SEQ ID NO: 3644: a fourth sequence of SEQ ID NO: 132 linked to a fifth sequence of SEQ ID NO: 39; a fourth sequence of SEQ ID NO: 141 linked to a fifth sequence of SEQ ID NO: 3644: a fourth sequence of SEQ ID NO: 141 linked to a fifth sequence of SEQ ID NO: 39: a fourth sequence of SEQ ID NO: 150 linked to a fifth sequence of SEQ ID NO: 3644; a fourth sequence of SEQ ID NO: 150 linked to a fifth sequence of SEQ ID NO: 39; a fourth sequence of SEQ ID NO: 154 linked to a fifth sequence of SEQ ID NO: 3644; a fourth sequence of SEQ ID NO: 154 linked to a fifth sequence of SEQ ID NO: 39: a fourth sequence of SEQ ID NO: 163 linked to a fifth sequence of SEQ ID NO: 3644; a fourth sequence of SEQ ID NO: 163 linked to a fifth sequence of SEQ ID NO: 39: a fourth sequence of SEQ ID NO: 169 linked to a fifth sequence of SEQ ID NO: 3644; a fourth sequence of SEQ ID NO: 169 linked to a fifth sequence of SEQ ID NO: 39: a fourth sequence of SEQ ID NO: 175 linked to a fifth sequence of SEQ ID NO: 3644; a fourth sequence of SEQ ID NO: 175 linked to a fifth sequence of SEQ ID NO: 39; a fourth sequence of SEQ ID NO: 181 linked to a fifth sequence of SEQ ID NO: 3644: a fourth sequence of SEQ ID NO: 181 linked to a fifth sequence of SEQ ID NO: 39: a fourth sequence of SEQ ID NO: 187 linked to a fifth sequence of SEQ ID NO: 3644: a fourth sequence of SEQ ID NO: 187 linked to a fifth sequence of SEQ ID NO: 39: a fourth sequence of SEQ ID NO: 193 linked to a fifth sequence of SEQ ID NO 3644; a fourth sequence of SEQ ID NO: 193 linked to a fifth sequence of SEQ ID NO: 39; a fourth sequence of SEQ ID NO: 202 linked to a fifth sequence of SEQ ID NO: 3644; a fourth sequence of SEQ ID NO: 202 linked to a fifth sequence of SEQ ID NO: 39; a fourth sequence of SEQ ID NO: 1101 linked to a fifth sequence of SEQ ID NO 3644; a fourth sequence of SEQ ID NO: 1101 linked to a fifth sequence of SEQ ID NO: 39: a fourth sequence of SEQ ID NO: 1349 linked to a fifth sequence of SEQ ID NO: 3644; a fourth sequence of SEQ ID NO: 1349 linked to a fifth sequence of SEQ ID NO: 39; a fourth sequence of SEQ ID NO: 1313 linked to a fifth sequence of SEQ ID NO: 3644: a fourth sequence of SEQ ID NO: 1313 linked to a fifth sequence of SEQ ID NO: 39; a fourth sequence of SEQ ID NO: 1361 linked to a fifth sequence of SEQ ID NO: 3644: a fourth sequence of SEQ ID NO: 1361 linked to a fifth sequence of SEQ ID NO: 39; a fourth sequence of SEQ ID NO. 1367 linked to a fifth sequence of SEQ ID NO: 3644: a fourth sequence of SEQ ID NO: 1367 linked to a fifth sequence of SEQ ID NO: 39: a fourth sequence of SEQ ID NO. 1367 linked to a fifth sequence of SEQ ID NO: 3644: a fourth sequence of SEQ ID NO. 1367 linked to a fifth sequence of SEQ ID NO: 39: a fourth sequence of SEQ ID NO: 3279 linked to a fifth sequence of SEQ ID NO: 3644; or a fourth sequence of SEQ ID NO: 3279 linked to a fifth sequence of SEQ ID NO: 39.

[1640] In some embodiments, the multifunctional polypeptide molecule comprises: (i) a first polypeptide chain comprising an anti-TCRvβ antibody heavy chain variable region, and an immunoglobulin heavy chain constant region; (ii) a second polypeptide chain comprising an IL-15 receptor alpha sushi domain or a functional fragment or a functional variant thereof, an IL-15 molecule or a functional fragment or a functional variant thereof, and an immunoglobulin heavy chain constant region; and (iii) a third polypeptide chain comprising an anti-TCRvβ antibody light chain variable region, and an immunoglobulin light chain constant region.

[1641] In some embodiments, the multifunctional polypeptide molecule comprises: (i) a first polypeptide chain comprising, from the N-terminus to the C-terminus, an anti-TCRvβ antibody heavy chain variable region operatively linked to an immunoglobulin heavy chain constant region; (ii) a second polypeptide chain comprising, from the N-terminus to the C-terminus, an IL-15 receptor alpha sushi domain or a functional fragment or a functional variant thereof operatively linked to an IL-15 molecule or a functional fragment or a functional variant thereof operatively linked to an immunoglobulin heavy chain constant region; and (iii) a third polypeptide chain comprising, from the N-terminus to the C-terminus, an anti-TCRvβ antibody light chain variable region operatively linked to an immunoglobulin light chain constant region.

[1642] In some embodiments, the IL-15 receptor alpha sushi domain is operatively linked to the IL-15 molecule or a functional fragment or a functional variant thereof via a linker, the IL-15 molecule or a functional fragment or a functional variant thereof is operatively linked to the immunoglobulin heavy chain constant region via a linker, or a combination thereof.

[1643] In some embodiments, the multifunctional polypeptide molecule comprises: (i) a first polypeptide chain comprising the sequence of SEQ ID NO: 1346, and the sequence of SEQ ID NO: 3649; (ii) a second polypeptide chain comprising the sequence of SEQ ID NO. 3523, the sequence of SEQ ID NO: 2170, and the sequence of SEQ ID NO: 3648; and (iii) a third polypeptide chain comprising the sequence of SEQ ID NO: 1349, and the sequence of SEQ ID NO: 3644.

[1644] In some embodiments, the multifunctional polypeptide molecule comprises: (i) a first polypeptide chain comprising, from the N-terminus to the C-terminus, the sequence of SEQ ID NO: 1346 operatively linked to the sequence of SEQ ID NO: 3649; (ii) a second polypeptide chain comprising, from the N-terminus to the C-terminus, the sequence of SEQ ID NO: 3523 operatively linked to the sequence of SEQ ID NO: 2170 operatively linked to the sequence of SEQ ID NO: 3648; and (iii) a third polypeptide chain comprising, from the N-terminus to the C-terminus, the sequence of SEQ ID NO: 1349 operatively linked to the sequence of SEQ ID NO: 3644.

[1645] In some embodiments, the sequence of SEQ ID NO: 3523 is operatively linked to the sequence of SEQ ID NO: 2170 via the sequence of SEQ ID NO: 3524, the sequence of SEQ ID NO: 2170 is operatively linked to the sequence of SEQ ID NO: 3648 via the sequence of SEQ ID NO: 3308, or a combination thereof.

[1646] In some embodiments, the multifunctional polypeptide molecule comprises: (i) a first polypeptide chain comprising a sequence having at least 75% sequence identity to the sequence of SEQ ID NO: 3517; (ii) a second polypeptide chain comprising a sequence having at least 75% sequence identity to the sequence of SEQ ID NO: 3519; and (iii) a third polypeptide chain comprising a sequence having at least 75% sequence identity to the sequence of SEQ ID NO: 3518.

[1647] In some embodiments, the multifunctional polypeptide molecule comprises: (i) a first polypeptide chain comprising the sequence of SEQ ID NO. 3517; (ii) a second polypeptide chain comprising the sequence of SEQ ID NO: 3519; and (iii) a third polypeptide chain comprising to the sequence of SEQ ID NO: 3518.

[1648] In some embodiments, the multifunctional polypeptide molecule comprises: (i) a first polypeptide chain comprising an anti-TCRvβ antibody heavy chain variable region, and an immunoglobulin heavy chain constant region; (ii) a second polypeptide chain comprising an IL-15 molecule or a functional fragment or a functional variant thereof, and an immunoglobulin heavy chain constant region; and (iii) a third polypeptide chain comprising an anti-TCRvβ antibody light chain variable region, and an immunoglobulin light chain constant region.

[1649] In some embodiments, the multifunctional polypeptide molecule comprises: (i) a first polypeptide chain comprising, from the N-terminus to the C-terminus, an anti-TCRvβ antibody heavy chain variable region operatively linked to an immunoglobulin heavy chain constant region; (ii) a second polypeptide chain comprising, from the N-terminus to the C-terminus, an IL-15 molecule or a functional fragment or a functional variant thereof operatively linked to an immunoglobulin heavy chain constant region; and (iii) a third polypeptide chain comprising, from the N-terminus to the C-terminus, an anti-TCRvβ antibody light chain variable region operatively linked to an immunoglobulin light chain constant region.

[1650] In some embodiments, the IL-15 molecule or a functional fragment or a functional variant thereof is operatively linked to the immunoglobulin heavy chain constant region via a linker.

[1651] In some embodiments, the multifunctional polypeptide molecule comprises: (i) a first polypeptide chain comprising the sequence of SEQ ID NO: 1346, and the sequence of SEQ ID NO: 3649; (ii) a second polypeptide chain comprising the sequence of SEQ ID NO: 2170, and the sequence of SEQ ID NO: 3648; and (iii) a third polypeptide chain comprising the sequence of SEQ ID NO: 1349, and the sequence of SEQ ID NO: 3644.

[1652] In some embodiments, the multifunctional polypeptide molecule comprises: (i) a first polypeptide chain comprising, from the N-terminus to the C-terminus, the sequence of SEQ ID NO: 1346 operatively linked to the sequence of SEQ ID NO: 3649; (ii) a second polypeptide chain comprising, from the N-terminus to the C-terminus, the sequence of SEQ ID NO: 2170 operatively linked to the sequence of SEQ ID NO: 3648; and (iii) a third polypeptide chain comprising, from the N-terminus to the C-terminus, the sequence of SEQ ID NO: 1349 operatively linked to the sequence of SEQ ID NO: 3644.

[1653] In some embodiments, the sequence of SEQ ID NO: 2170 is operatively linked to the sequence of SEQ ID NO: 3648 via the sequence of SEQ ID NO: 3308, or a combination thereof.

[1654] In some embodiments, the multifunctional polypeptide molecule comprises: (i) a first polypeptide chain comprising a sequence having at least 75% sequence identity to the sequence of SEQ ID NO: 3517; (ii) a second polypeptide chain comprising a sequence having at least 75% sequence identity to the sequence of SEQ ID NO: 3520; and (iii) a third polypeptide chain comprising a sequence having at least 75% sequence identity to the sequence of SEQ ID NO: 3518.

[1655] In some embodiments, the multifunctional polypeptide molecule comprises: (i) a first polypeptide chain comprising the sequence of SEQ ID NO: 3517; (ii) a second polypeptide chain comprising the sequence of SEQ ID NO: 3520; and (iii) a third polypeptide chain comprising to the sequence of SEQ ID NO: 3518.

[1656] In some embodiments, the multifunctional polypeptide molecule comprises: (i) a first polypeptide chain comprising an anti-TCRvβ antibody heavy chain variable region, and an immunoglobulin heavy chain constant region; (ii) a second polypeptide chain comprising an IL-2 molecule or a functional fragment or a functional variant thereof or an IL-2 C125A mutant molecule or a functional fragment or a functional variant thereof, and an immunoglobulin heavy chain constant region; and (iii) a third polypeptide chain comprising an anti-TCRvβ antibody light chain variable region, and an immunoglobulin light chain constant region.

[1657] In some embodiments, the multifunctional polypeptide molecule comprises: (i) a first polypeptide chain comprising, from the N-terminus to the C-terminus, an anti-TCRvβ antibody heavy chain variable region operatively linked to an immunoglobulin heavy chain constant region; (ii) a second polypeptide chain comprising, from the N-terminus to the C-terminus, an IL-2 molecule or a functional fragment or a functional variant thereof or an IL-2 C125A mutant molecule or a functional fragment or a functional variant thereof operatively linked to an immunoglobulin heavy chain constant region; and (iii) a third polypeptide chain comprising, from the N-terminus to the C-tenninus, an anti-TCRvβ antibody light chain variable region operatively linked to an immunoglobulin light chain constant region.

[1658] In some embodiments, the IL-2 molecule or a functional fragment or a functional variant thereof or the IL-2 C125A mutant molecule or a functional fragment or a functional variant thereof is operatively linked to the immunoglobulin heavy chain constant region via a linker.

[1659] In some embodiments, the multifunctional polypeptide molecule comprises: (i) a first polypeptide chain comprising the sequence of SEQ ID NO: 1346, and the sequence of SEQ ID NO: 3649; (ii) a second polypeptide chain comprising the sequence of SEQ ID NO: 2270, and the sequence of SEQ ID NO: 3648; and (iii) a third polypeptide chain comprising the sequence of SEQ ID NO: 1349, and the sequence of SEQ ID NO: 3644.

[1660] In some embodiments, the multifunctional polypeptide molecule comprises: (i) a first polypeptide chain comprising, from the N-terminus to the C-terminus, the sequence of SEQ ID NO: 1346 operatively linked to the sequence of SEQ ID NO: 3649; (ii) a second polypeptide chain comprising, from the N-terminus to the C-terminus, the sequence of SEQ ID NO: 2270 operatively linked to the sequence of SEQ ID NO: 3648; and (iii) a third polypeptide chain comprising, from the N-terminus to the C-terminus, the sequence of SEQ ID NO: 1349 operatively linked to the sequence of SEQ ID NO: 3644.

[1661] In some embodiments, the sequence of SEQ ID NO: 2270 is operatively linked to the sequence of SEQ ID NO: 3648 via the sequence of SEQ ID NO: 3308, or a combination thereof.

[1662] In some embodiments, the multifunctional polypeptide molecule comprises: (i) a first polypeptide chain comprising a sequence having at least 75% sequence identity to the sequence of SEQ ID NO: 3517; (ii) a second polypeptide chain comprising a sequence having at least 75% sequence identity to the sequence of SEQ ID NO: 3521; and (iii) a third polypeptide chain comprising a sequence having at least 75% sequence identity to the sequence of SEQ ID NO: 3518.

[1663] In some embodiments, the multifunctional polypeptide molecule comprises: (i) a first polypeptide chain comprising the sequence of SEQ ID NO: 3517; (ii) a second polypeptide chain comprising the sequence of SEQ ID NO: 3521; and (iii) a third polypeptide chain comprising to the sequence of SEQ ID NO: 3518.

[1664] In some embodiments, the multifunctional poly peptide molecule comprises the second polypeptide chain comprising an immunoglobulin heavy chain constant region comprising L234A, L235A, and P329G mutations, the third polypeptide chain comprising an immunoglobulin light chain constant region comprising L234A, L235A, and P329G mutations, or a combination thereof.

[1665] In some embodiments, the multifunctional polypeptide molecule comprises: (i) a first polypeptide chain comprising the sequence of SEQ ID NO: 3530, and the sequence of SEQ ID NO: 3531; (ii) a second polypeptide chain comprising the sequence of SEQ ID NO: 2191, and the sequence of SEQ ID NO: 3533; and (iii) a third polypeptide chain comprising the sequence of SEQ ID NO: 3527, and the sequence of SEQ ID NO: 3528.

[1666] In some embodiments, the multifunctional poly peptide molecule comprises: (i) a first polypeptide chain comprising, from the N-terminus to the C-terminus, the sequence of SEQ ID NO: 3530 operatively linked to the sequence of SEQ ID NO: 3531; (ii) a second polypeptide chain comprising, from the N-terminus to the C-terminus, the sequence of SEQ ID NO: 2191 operatively linked to the sequence of SEQ ID NO: 3533; and (iii) a third polypeptide chain comprising, from the N-terminus to the C-terminus, the sequence of SEQ ID NO: 3527 operatively linked to the sequence of SEQ ID NO: 3528.

[1667] In some embodiments, the sequence of SEQ ID NO: 2191 is operatively linked to the sequence of SEQ ID NO: 3533 via the sequence of SEQ ID NO: 3308, or a combination thereof.

[1668] In some embodiments, the first polypeptide chain further comprises the sequence of SEQ ID NO. 3547 operatively linked to the sequence of SEQ ID NO: 3531, the second polypeptide chain further comprises the sequence of SEQ ID NO: 3534 operatively linked to the sequence of SEQ ID NO: 3533, or a combination thereof.

[1669] In some embodiments, the multifunctional polypeptide molecule comprises: (i) a first polypeptide chain comprising a sequence having at least 75% sequence identity to the sequence of SEQ ID NO: 3529 or the sequence of SEQ ID NO: 3548; (ii) a second polypeptide chain comprising a sequence having at least 75% sequence identity to the sequence of SEQ ID NO: 3532 or the sequence of SEQ ID NO: 3549; and (iii) a third polypeptide chain comprising a sequence having at least 75% sequence identity to the sequence of SEQ ID NO: 3526.

[1670] In some embodiments, the multifunctional polypeptide molecule comprises: (i) a first polypeptide chain comprising the sequence of SEQ ID NO: 3529 or the sequence of SEQ ID NO: 3548; (ii) a second polypeptide chain comprising the sequence of SEQ ID NO: 3532 or the sequence of SEQ ID NO: 3549; and (ii) a third polypeptide chain comprising to the sequence of SEQ ID NO: 3526.

[1671] In some embodiments, the multifunctional polypeptide molecule comprises: (i) a first polypeptide chain comprising an anti-TCRvβ antibody heavy chain variable region, and an immunoglobulin heavy chain constant region; (ii) a second polypeptide chain comprising an IL-7 molecule or a functional fragment or a functional variant thereof, and an immunoglobulin heavy chain constant region; and (iii) a third polypeptide chain comprising an anti-TCRvβ antibody light chain variable region, and an immunoglobulin light chain constant region.

[1672] In some embodiments, the multifunctional polypeptide molecule comprises: (i) a first polypeptide chain comprising, from the N-terminus to the C-terminus, an anti-TCRvβ antibody heavy chain variable region operatively linked to an immunoglobulin heavy chain constant region; (ii) a second polypeptide chain comprising, from the N-terminus to the C-terminus, an IL-7 molecule or a functional fragment or a functional variant thereof operatively linked to an immunoglobulin heavy chain constant region; and (iii) a third polypeptide chain comprising, from the N-terminus to the C-terminus, an anti-TCRvβ antibody light chain variable region operatively linked to an immunoglobulin light chain constant region.

[1673] In some embodiments, the IL-7 molecule or a functional fragment or a functional variant thereof is operatively linked to the immunoglobulin heavy chain constant region via a linker.

[1674] In some embodiments, the multifunctional polypeptide molecule comprises: (i) a first polypeptide chain comprising the sequence of SEQ ID NO: 1346, and the sequence of SEQ ID NO: 3649; (ii) a second polypeptide chain comprising the sequence of SEQ ID NO: 3540, and the sequence of SEQ ID NO: 3648; and (iii) a third polypeptide chain comprising the sequence of SEQ ID NO: 1349, and the sequence of SEQ ID NO: 3644.

[1675] In some embodiments, the multifunctional polypeptide molecule comprises: (i) a first polypeptide chain comprising, from the N-terminus to the C-terminus, the sequence of SEQ ID NO: 1346 operatively linked to the sequence of SEQ ID NO: 3649; (ii) a second polypeptide chain comprising, from the N-terminus to the C-terminus, the sequence of SEQ ID NO: 3540 operatively linked to the sequence of SEQ ID NO: 3648; and (iii) a third polypeptide chain comprising, from the N-terminus to the C-terminus, the sequence of SEQ ID NO: 1349 operatively linked to the sequence of SEQ ID NO: 3644.

[1676] In some embodiments, the sequence of SEQ ID NO: 3540 is operatively linked to the sequence of SEQ ID NO: 3648 via the sequence of SEQ ID NO: 3308, or a combination thereof.

[1677] In some embodiments, the multifunctional polypeptide molecule comprises: (i) a first polypeptide chain comprising a sequence having at least 75% sequence identity to the sequence of SEQ ID NO: 3517; (ii) a second polypeptide chain comprising a sequence having at least 75% sequence identity to the sequence of SEQ ID NO: 3539; and (iii) a third polypeptide chain comprising a sequence having at least 75% sequence identity to the sequence of SEQ ID NO: 3518.

[1678] In some embodiments, the multifunctional polypeptide molecule comprises: (i) a first polypeptide chain comprising the sequence of SEQ ID NO: 3517; (ii) a second polypeptide chain comprising the sequence of SEQ ID NO: 3539; and (iii) a third polypeptide chain comprising to the sequence of SEQ ID NO: 3518.

[1679] In some embodiments, the multifunctional poly peptide molecule comprises: (i) a first polypeptide chain comprising an anti-TCRvβ antibody heavy chain variable region, and an immunoglobulin heavy chain constant region; (ii) a second polypeptide chain comprising an IL-12 molecule or a functional fragment or a functional variant thereof, and an immunoglobulin heavy chain constant region; and (iii) a third polypeptide chain comprising an anti-TCRvβ antibody light chain variable region, and an immunoglobulin light chain constant region.

[1680] In some embodiments, the multifunctional polypeptide molecule comprises: (i) a first polypeptide chain comprising, from the N-terminus to the C-terminus, an anti-TCRvβ antibody heavy chain variable region operatively linked to an immunoglobulin heavy chain constant region; (ii) a second polypeptide chain comprising, from the N-terminus to the C-terminus, an IL-12 molecule or a functional fragment or a functional variant thereof operatively linked to an immunoglobulin heavy chain constant region; and (iii) a third polypeptide chain comprising, from the N-terminus to the C-terminus, an anti-TCRvβ antibody light chain variable region operatively linked to an immunoglobulin light chain constant region.

[1681] In some embodiments, the IL-12 molecule or a functional fragment or a functional variant thereof comprises an IL-12 beta subunit or a functional fragment or a functional variant thereof and a IL-12 alpha subunit or a functional fragment or a functional variant thereof.

[1682] In some embodiments, the IL-12 molecule or a functional fragment or a functional variant thereof comprises, from the N-terminus to the C-terminus, an IL-12 beta subunit or a functional fragment or a functional variant thereof operatively linked to a IL-12 alpha subunit or a functional fragment or a functional variant thereof.

[1683] In some embodiments, the IL-12 beta subunit or a functional fragment or a functional variant thereof is operatively linked to the IL-12 alpha subunit or a functional fragment or a functional variant thereof via a linker, the IL-12 alpha subunit or a functional fragment or a functional variant thereof is operatively linked to the immunoglobulin heavy chain constant region via a linker, or a combination thereof.

[1684] In some embodiments, the multifunctional polypeptide molecule comprises: (i) a first polypeptide chain comprising the sequence of SEQ ID NO. 1346, and the sequence of SEQ ID NO: 3649; (ii) a second polypeptide chain comprising the sequence of SEQ ID NO: 3542, and the sequence of SEQ ID NO: 3648; and (iii) a third polypeptide chain comprising the sequence of SEQ ID NO: 1349, and the sequence of SEQ ID NO: 3644.

[1685] In some embodiments, the multifunctional polypeptide molecule comprises: (i) a first polypeptide chain comprising, from the N-terminus to the C-terminus, the sequence of SEQ ID NO: 1346 operatively linked to the sequence of SEQ ID NO: 3649; (ii) a second polypeptide chain comprising, from the N-terminus to the C-terminus, the sequence of SEQ ID NO: 3542 operatively linked to the sequence of SEQ ID NO: 3648; and (iii) a third polypeptide chain comprising, from the N-terminus to the C-terminus, the sequence of SEQ ID NO: 1349 operatively linked to the sequence of SEQ ID NO: 3644.

[1686] In some embodiments, the IL-12 molecule or a functional fragment or a functional variant thereof comprises the sequence of SEQ ID NO: 3543 and the sequence of SEQ ID NO: 3545.

[1687] In some embodiments, the IL-12 molecule or a functional fragment or a functional variant thereof comprises, from the N-terminus to the C-terminus, the sequence of SEQ ID NO: 3543 operatively linked to the sequence of SEQ ID NO:3545.

[1688] In some embodiments, the sequence of SEQ ID NO: 3543 is operatively linked to the sequence of SEQ ID NO: 3545 via the sequence of SEQ ID NO: 3544, the sequence of SEQ ID NO: 3545 is operatively linked to the sequence of SEQ ID NO: 3648 via the sequence of SEQ ID NO: 3308, or a combination thereof.

[1689] In some embodiments, the multifunctional polypeptide molecule comprises: (i) a first polypeptide chain comprising a sequence having at least 75% sequence identity to the sequence of SEQ ID NO: 3517; (ii) a second polypeptide chain comprising a sequence having at least 75% sequence identity to the sequence of SEQ ID NO: 3541, and (iii) a third polypeptide chain comprising a sequence having at least 75% sequence identity to the sequence of SEQ ID NO: 3518.

[1690] In some embodiments, the multifunctional polypeptide molecule comprises: (i) a first polypeptide chain comprising the sequence of SEQ ID NO: 3517; (ii) a second polypeptide chain comprising the sequence of SEQ ID NO: 3541; and (iii) a third polypeptide chain comprising to the sequence of SEQ ID NO: 3518.

[1691] In some embodiments, the multifunctional polypeptide molecule comprises: (i) a first polypeptide chain comprising an anti-TCRvβ antibody heavy chain variable region, and an immunoglobulin heavy chain constant region; (ii) a second polypeptide chain comprising an IL-21 molecule or a functional fragment or a functional variant thereof, and an immunoglobulin heavy chain constant region; and (iii) a third polypeptide chain comprising an anti-TCRvβ antibody light chain variable region, and an immunoglobulin light chain constant region.

[1692] In some embodiments, the multifunctional polypeptide molecule comprises: (i) a first polypeptide chain comprising, from the N-terminus to the C-terminus, an anti-TCRvβ antibody heavy chain variable region operatively linked to an immunoglobulin heavy chain constant region; (ii) a second polypeptide chain comprising, from the N-terminus to the C-terminus, an IL-21 molecule or a functional fragment or a functional variant thereof operatively linked to an immunoglobulin heavy chain constant region; and (iii) a third polypeptide chain comprising, from the N-terminus to the C-terminus, an anti-TCRyβ antibody light chain variable region operatively linked to an immunoglobulin light chain constant region.

[1693] In some embodiments, the IL-21 molecule or a functional fragment or a functional variant thereof is operatively linked to the immunoglobulin heavy chain constant region via a linker, or a combination thereof.

[1694] In some embodiments, the multifunctional polypeptide molecule comprises: (i) a first polypeptide chain comprising the sequence of SEQ ID NO: 1346, and the sequence of SEQ ID NO: 3649; (ii) a second polypeptide chain comprising the sequence of SEQ ID NO: 2193, and the sequence of SEQ ID NO: 3648; and (iii) a third polypeptide chain comprising the sequence of SEQ ID NO: 1349, and the sequence of SEQ ID NO: 3644.

[1695] In some embodiments, the multifunctional polypeptide molecule comprises: (i) a first polypeptide chain comprising, from the N-terminus to the C-terminus, the sequence of SEQ ID NO: 1346 operatively linked to the sequence of SEQ ID NO: 3649; (ii) a second polypeptide chain comprising, from the N-terminus to the C-terminus, the sequence of SEQ ID NO: 2193 operatively linked to the sequence of SEQ ID NO: 3648; and (iii) a third polypeptide chain comprising, from the N-terminus to the C-terminus, the sequence of SEQ ID NO: 1349 operatively linked to the sequence of SEQ ID NO: 3644.

[1696] In some embodiments, the sequence of SEQ ID NO: 2193 is operatively linked to the sequence of SEQ ID NO: 3648 via the sequence of SEQ ID NO: 3308.

[1697] In some embodiments, the multifunctional polypeptide molecule comprises: (i) a first polypeptide chain comprising a sequence having at least 75% sequence identity to the sequence of SEQ ID NO: 3517; (ii) a second polypeptide chain comprising a sequence having at least 75% sequence identity to the sequence of SEQ ID NO: 3546; and (iii) a third polypeptide chain comprising a sequence having at least 75% sequence identity to the sequence of SEQ ID NO: 3518.

[1698] In some embodiments, the multifunctional polypeptide molecule comprises: (i) a first polypeptide chain comprising the sequence of SEQ ID NO: 3517; (ii) a second polypeptide chain comprising the sequence of SEQ ID NO: 3546; and (iii) a third polypeptide chain comprising to the sequence of SEQ ID NO: 3518.

[1699] In some embodiments, the multifunctional polypeptide molecule comprises: (i) a first polypeptide chain comprising an anti-TCRvβ antibody heavy chain variable region, and an immunoglobulin heavy chain constant region; and (ii) a second poly peptide chain comprising an anti-TCRv antibody light chain variable region, an immunoglobulin light chain constant region, and an IL-2 molecule or a functional fragment or a functional variant thereof.

[1700] In some embodiments, the multifunctional polypeptide molecule comprises: (i) a first polypeptide chain comprising, from the N-terminus to the C-terminus, an anti-TCRvβ antibody heavy chain variable region operatively linked to an immunoglobulin heavy chain constant region; and (ii) a second polypeptide chain comprising, from the N-terminus to the C-terminus, an anti-TCRvβ antibody light chain variable region operatively linked to an immunoglobulin light chain constant region operatively linked to an IL-2 molecule or a functional fragment or a functional variant thereof.

[1701] In some embodiments, the immunoglobulin light chain constant region is operatively linked to the IL-21 molecule or a functional fragment or a functional variant thereof via a linker.

[1702] In some embodiments, the multifunctional polypeptide molecule comprises two first polypeptide chains and two second polypeptide chains.

[1703] In some embodiments, the multifunctional polypeptide molecule comprises the first polypeptide chain comprising an immunoglobulin heavy chain constant region comprising L234A, L235A, and P329G mutations.

[1704] In some embodiments, the multifunctional polypeptide molecule comprises: (i) a first polypeptide chain comprising the sequence of SEQ ID NO: 3530 and the sequence of SEQ ID NO: 3537; and (ii) a second polypeptide chain comprising the sequence of SEQ ID NO: 3527, the sequence of SEQ ID NO: 3528, and the sequence of SEQ ID NO: 2191.

[1705] In some embodiments, the multifunctional polypeptide molecule comprises: (i) a first polypeptide chain comprising, from the N-terminus to the C-terminus, the sequence of SEQ ID NO: 3530 operatively linked to the sequence of SEQ ID NO: 3537; and (ii) a second polypeptide chain comprising, from the N-terminus to the C-terminus, the sequence of SEQ ID NO: 3527 operatively linked to the sequence of SEQ ID NO: 3528 operatively linked to the sequence of SEQ ID NO: 2191.

[1706] In some embodiments, the sequence of SEQ ID NO: 3528 is operatively linked to the sequence of SEQ ID NO: 2191 via the sequence of SEQ ID NO: 3309.

[1707] In some embodiments, the multifunctional polypeptide molecule comprises two first polypeptide chains and two second polypeptide chains.

[1708] In some embodiments, the multifunctional polypeptide molecule comprises: (i) a first polypeptide chain comprising a sequence having at least 75% sequence identity to the sequence of SEQ ID NO: 3536; and (ii) a second polypeptide chain comprising a sequence having at least 75% sequence identity to the sequence of SEQ ID NO: 3535.

[1709] In some embodiments, the multifunctional polypeptide molecule comprises: (i) a first polypeptide chain comprising the sequence of SEQ ID NO. 3536; and (ii) a second polypeptide chain comprising the sequence of SEQ ID NO: 3535.

[1710] In another aspect, described herein is an antibody comprising an anti-T cell receptor beta variable chain (TCRβV) binding domain comprising: (i) a heavy chain variable region (VH) comprising a heavy chain complementarity determining region 1 (HC CDR1), a heavy chain complementarity determining region 2 (HC CDR2), and a heavy chain complementarity determining region 3 (HC CDR3) comprising an amino acid sequence having at least 75% sequence identity to SEQ ID NO: 3650, SEQ ID NO: 3651, and SEQ ID NO: 5, respectively; (ii) a light chain variable region (VL) comprising a light chain complementarity determining region 1 (LC CDR1), a light chain complementarity determining region 2 (LC CDR2), and a light chain complementarity determining region 3 (LC CDR3) comprising an amino acid sequence having at least 75% sequence identity to SEQ ID NO: 3655, SEQ ID NO: 3653, and SEQ ID NO: 8, respectively; or (iii) a combination thereof.

[1711] In some embodiments, the TCRβV binding domain comprising: (i) a VH comprising a HC CDR1, a HC CDR2, and a HC CDR3 comprising the amino acid sequence of SEQ ID NO: 3650, SEQ ID NO: 3651, and SEQ ID NO: 5, respectively; (ii) a VL comprising a LC CDR1, a LC CDR2, and a LC CDR3 comprising the amino acid sequence of SEQ ID NO: 3655, SEQ ID NO: 3653, and SEQ ID NO: 8, respectively; or (iii) a combination thereof.

[1712] In some embodiments, the TCRβV binding domain comprising: (i) a VH comprising an amino acid sequence having at least 75% sequence identity to SEQ ID NO: 1346; (ii) a VL comprising an amino acid sequence having at least 75% sequence identity to SEQ ID NO: 1349; or (iii) a combination thereof.

[1713] In some embodiments, the TCRβV binding domain comprising: (i) a VH comprising the amino acid sequence of SEQ ID NO. 1346; (ii) a VL comprising the amino acid sequence of SEQ ID NO: 1349; or (iii) a combination thereof.

[1714] In an aspect, described herein is a nucleic acid molecule comprising a nucleotide sequence encoding the multifunctional polypeptide molecule as described herein or the antibody as described herein.

[1715] In some embodiments, the nucleic acid molecule is an isolated nucleic acid molecule.

[1716] In an aspect, described herein is a vector comprising one or more of the nucleic acid molecules as described herein.

[1717] In an aspect, described herein is a cell comprising the nucleic acid molecules as described herein, or the vector as described herein.

[1718] In an aspect, described herein is a pharmaceutical composition comprising the multifunctional polypeptide molecule as described herein, the antibody as described herein, the nucleic acid molecules as described herein, the vector as described herein, or the cell as described herein, and a pharmaceutically acceptable carrier, excipient, or diluent.

[1719] In an aspect, described herein is a method of treating a condition or disease in a subject in need therefor comprising administering to the subject a therapeutically effective amount of the multifunctional polypeptide molecule as described herein, the antibody as described herein, the nucleic acid molecules as described herein, the vector as described herein, the cell as described herein, the pharmaceutical composition as described herein, or a combination thereof, wherein the administering is effective to treat the condition or disease in the subject.

[1720] In some embodiments, the condition or disease is cancer.

[1721] In some embodiments, the cancer is a solid tumor, a hematological cancer, a metastatic cancer, a soft tissue tumor, or a combination thereof.

[1722] In some embodiments, the cancer is the solid tumor, and the solid tumor is selected from the group consisting of melanoma, pancreatic cancer, breast cancer, colorectal cancer, lung cancer, skin cancer, ovarian cancer, liver cancer, and a combination thereof.

[1723] In some embodiments, the cancer is the hematological cancer, and the hematological cancer is selected from the group consisting of Hodgkin's lymphoma. Non-Hodgkin's lymphoma, acute myeloid leukemia (AML), chronic myeloid leukemia, myelodysplastic syndrome, multiple myeloma. T-cell lymphoma, acute lymphocytic leukemia, and a combination thereof.

[1724] In some embodiments, the Non-Hodgkin's lymphoma is selected from the group consisting of B cell lymphoma, diffuse large B cell lymphoma (DLBCL), follicular lymphoma, chronic lymphocytic leukemia (B-CLL), mantle cell lymphoma, marginal zone B-cell lymphoma, Burkitt lymphoma, lymphoplasmacytic lymphoma, hairy cell leukemia, and a combination thereof.

[1725] In some embodiments, the T-cell lymphoma is peripheral T-cell lymphoma.

[1726] In some embodiments, the cancer is characterized by a cancer antigen present on the cancer.

[1727] In some embodiments, the cancer antigen is a tumor antigen, a stromal antigen, or a hematological antigen.

[1728] In some embodiments, the cancer antigen is selected from the group consisting of BCMA, CD19, CD20, CD22. FcRH5, PDL1. CD47, gangloside 2 (GD2), prostate stem cell antigen (PSCA), prostate specific membrane antigen (PMSA), prostate-specific antigen (PSA), carcinoembryonic antigen (CEA), Ron Kinase, c-Met, Immature laminin receptor, TAG-72, BING-4, Calcium-activated chloride channel 2, Cyclin-B1, 9D7. Ep-CAM, EphA3, Her2/neu, Telomerase, SAP-1, Survivin, NY-ESO-1/LAGE-1, PRAME, SSX-2, Melan-A/MART-1, Gp100/pmel17, Tyrosinase, TRP-1/-2, MC1R, β-catenin, BRCA1/2, CDK4, CML66, Fibronectin, p53, Ras, TGF-B receptor, AFP, ETA, MAGE, MUC-1. CA-125, BAGE, GAGE, NY-ESO-1, β-catenin. CDK4, CDC27, a actinin-4, TRP 1/gp75. TRP2, gp 100, Melan-A/MARTI, gangliosides, WT1, EphA3, Epidermal growth factor receptor (EGFR), MART-2, MART-1, MUC1, MUC2, MUM1, MUM2, MUM3, NA88-1, NPM, OA1, OGT, RCC, RUI1, RUI2, SAGE, TRG, TRP1, TSTA, Folate receptor alpha, L1-CAM, CAIX, gpA33, GD3, GM2, VEGFR, Integrins, carbohydrates, IGF1R, EPHA3, TRAILR1, TRAILR2, RANKL, FAP, TGF-beta, hyaluronic acid, collagen, tenascin C, and tenascin W.

[1729] In some embodiments, the method further comprises administering a second therapeutic agent or therapy to the subject.

[1730] In some embodiments, the second therapeutic agent or therapy comprises a chemotherapeutic agent, a biologic agent, a hormonal therapy, radiation, or surgery.

[1731] In some embodiments, the second therapeutic agent or therapy is administered in combination with the multifunctional polypeptide molecule as described herein, the antibody as described herein, the nucleic acid molecules as described herein, the vector as described herein, the cell as described herein, the pharmaceutical composition as described herein, sequentially, simultaneously, or concurrently.

[1732] In some embodiments, the multifunctional molecule comprises: (i) a first polypeptide chain comprising a sequence having at least 50%, 55%, 60%, 65%, 70%, 75%, 80%, 85%, 90%, 95%, 96%, 97%, 98%, 99%, 99.5%, 99.7%, or 99.9% sequence identity to the sequence of SEQ ID NO: 1346 and a sequence having at least 50%, 55%, 60%, 65%, 70%, 75%, 80%, 85%, 90%, 95%, 96%, 97%, 98%, 99%, 99.5%. 99.7%, or 99.9% sequence identity to the sequence of SEQ ID NO: 3792; (ii) a second polypeptide chain comprising a sequence having at least 50%, 55%, 60%, 65%, 70%, 75%, 80%, 85%, 90%, 95%, 96%, 97%, 98%, 99%, 99.5%, 99.7%, or 99.9% sequence identity to the sequence of SEQ ID NO: 2270 and a sequence having at least 50%, 55%, 60%, 65%, 70%, 75%, 80%, 85%, 90%, 95%, 96%, 97%, 98%, 99%, 99.5%. 99.7%, or 99.9% sequence identity to the sequence of SEQ ID NO: 3794; (iii) a third polypeptide chain comprising a sequence having at least 50%, 55%, 60%, 65%, 70%, 75%, 80%, 85%, 90%, 95%, 96%, 97%, 98%, 99%, 99.5%, 99.7%, or 99.9% sequence identity to the sequence of SEQ ID NO: 1349 and a sequence having at least 50%, 55%, 60%, 65%, 70%, 75%, 80%, 85%, 90%, 95%, 96%, 97%, 98%, 99%, 99.5%, 99.7%, or 99.9% sequence identity to the sequence of SEQ ID NO: 3644, or (iv) a combination thereof. In some embodiments, the second polypeptide chain further r comprises the sequence of SEQ ID NO: 3308.

[1733] In some embodiments, the multifunctional molecule comprises: (i) a first polypeptide chain comprising a sequence having at least 50%, 55%, 60%, 65%, 70%, 75%, 80%, 85%, 90%, 95%, 96%, 97%, 98%, 99%, 99.5%, 99.7%, or 99.9% sequence identity to the sequence of SEQ ID NO: 1346 operatively linked to a sequence having at least 50%, 55%, 60%, 65%, 70%, 75%, 80%, 85%, 90%, 95%, 96%, 97%, 98%, 99%, 99.5%, 99.7%, or 99.9% sequence identity to the sequence of SEQ ID NO: 3792; (ii) a second polypeptide chain comprising a sequence having at least 50%, 55%, 60%, 65%, 70%, 75%, 80%, 85%, 90%, 95%, 96%, 97%, 98%, 99%, 99.5%, 99.7%, or 99.9% sequence identity to the sequence of SEQ ID NO: 2270 operatively linked to a sequence having at least 50%, 55%, 60%, 65%, 70%, 75%, 80%, 85%, 90%, 95%, 96%, 97%, 98%, 99%, 99.5%, 99.7%, or 99.9% sequence identity to the sequence of SEQ ID NO: 3794; (iii) a third polypeptide chain comprising a sequence having at least 50%, 55%, 60%, 65%, 70%, 75%, 80%, 85%, 90%, 95%, 96%, 97%, 98%, 99%, 99.5%, 99.7%, or 99.9% sequence identity to the sequence of SEQ ID NO: 1349 operatively linked to a sequence having at least 50%, 55%, 60%, 65%, 70%, 75%, 80%, 85%, 90%, 95%, 96%, 97%, 98%, 99%, 99.5%, 99.7%, or 99.9% sequence identity to the sequence of SEQ ID NO: 3644, or (iv) a combination thereof. In some embodiments, the second polypeptide chain comprises a sequence having at least 50%, 55%, 60%, 65%, 70%, 75%, 80%, 85%, 90%, 95%, 96%, 97%, 98%, 99%, 99.5%, 99.7%, or 99.9% sequence identity to the sequence of SEQ ID NO: 2270 operatively linked to a sequence having at least 50%, 55%, 60%, 65%, 70%, 75%, 80%, 85%, 90%, 95%, 96%, 97%, 98%, 99%, 99.5%, 99.7%, or 99.9% sequence identity to the sequence of SEQ ID NO: 3794 via the sequence of SEQ ID NO: 3308.

[1734] In some embodiments, the multifunctional molecule comprises: (i) a first polypeptide chain comprising the sequence of SEQ ID NO: 1346 and the sequence of SEQ ID NO: 3792; (ii) a second polypeptide chain comprising the sequence of SEQ ID NO: 2270 and the sequence of SEQ ID NO: 3794; (iii) a third polypeptide chain comprising the sequence of SEQ ID NO: 1349 and the sequence of SEQ ID NO: 3644, or (iv) a combination thereof. In some embodiments, the second polypeptide chain further r comprises the sequence of SEQ ID NO: 3308.

[1735] In some embodiments, the multifunctional molecule comprises: (i) a first polypeptide chain comprising the sequence of SEQ ID NO: 1346 operatively linked to the sequence of SEQ ID NO: 3792; (ii) a second polypeptide chain comprising the sequence of SEQ ID NO: 2270 operatively linked to the sequence of SEQ ID NO: 3794; (iii) a third polypeptide chain comprising the sequence of SEQ ID NO: 1349 operatively linked to the sequence of SEQ ID NO: 3644, or (iv) a combination thereof. In some embodiments, the second polypeptide chain comprises the sequence of SEQ ID NO: 2270 operatively linked to the sequence of SEQ ID NO: 3794 via the sequence of SEQ ID NO: 3308.

[1736] In some embodiments, the multifunctional molecule comprises: (i) a first polypeptide chain comprising a sequence having at least 50%, 55%, 60%, 65%, 70%, 75%, 80%, 85%, 90%, 95%, 96%, 97%, 98%, 99%, 99.5%, 99.7%, or 99.9% sequence identity to the sequence of SEQ ID NO: 3791; (ii) a second polypeptide chain comprising a sequence having at least 50%, 55%, 60%, 65%, 70%, 75%, 80%, 85%, 90%, 95%, 96%, 97%, 98%, 99%, 99.5%, 99.7%, or 99.9% sequence identity to the sequence of SEQ ID NO: 3793; (iii) a third polypeptide chain comprising a sequence having at least 50%, 55%, 60%, 65%, 70%, 75%, 80%, 85%, 90%, 95%, 96%, 97%, 98%, 99%, 99.5%, 99.7%, or 99.9% sequence identity to the sequence of SEQ ID NO: 3518, or (iv) a combination thereof.

[1737] In some embodiments, the multifunctional molecule comprises: (i) a first polypeptide chain comprising the sequence of SEQ ID NO: 3791; (ii) a second polypeptide chain comprising the sequence of SEQ ID NO: 3793; (iii) a third polypeptide chain comprising a sequence the sequence of SEQ ID NO: 3518, or (iv) a combination thereof.

[1738] In some embodiments, the multifunctional molecule comprises: (i) a first polypeptide chain comprising a sequence having at least 50%, 55%, 60%, 65%, 70%, 75%, 80%, 85%, 90%, 95%, 96%, 97%, 98%, 99%, 99.5%, 99.7%, or 99.9% sequence identity to the sequence of SEQ ID NO: 1113 and a sequence having at least 50%, 55%, 60%, 65%, 70%, 75%, 80%, 85%, 90%, 95%, 96%, 97%, 98%, 99%, 99.5%, 99.7%, or 99.9% sequence identity to the sequence of SEQ ID NO: 3649; (ii) a second polypeptide chain comprising a sequence having at least 50%, 55%, 60%, 65%, 70%, 75%, 80%, 85%, 90%, 95%, 96%, 97%, 98%, 99%, 99.5%, 99.7%, or 99.9% sequence identity to the sequence of SEQ ID NO: 2270 and a sequence having at least 50%, 55%, 60%, 65%, 70%, 75%, 80%, 85%, 90%, 95%, 96%, 97%, 98%, 99%, 99.5%, 99.7%, or 99.9% sequence identity to the sequence of SEQ ID NO: 3794; (iii) a third polypeptide chain comprising a sequence having at least 50%, 55%, 60%, 65%, 70%, 75%, 80%, 85%, 90%, 95%, 96%, 97%, 98%, 99%, 99.5%, 99.7%, or 99.9% sequence identity to the sequence of SEQ ID NO: 3797 and a sequence having at least 50%, 55%, 60%, 65%, 70%, 75%, 80%, 85%, 90%, 95%, 96%, 97%, 98%, 99%, 99.5%, 99.7%, or 99.9% sequence identity to the sequence of SEQ ID NO: 3644, or (iv) a combination thereof. In some embodiments, the second polypeptide chain further r comprises the sequence of SEQ ID NO: 3308.

[1739] In some embodiments, the multifunctional molecule comprises: (i) a first polypeptide chain comprising a sequence having at least 50%, 55%, 60%, 65%, 70%, 75%, 80%, 85%, 90%, 95%, 96%, 97%, 98%, 99%, 99.5%, 99.7%, or 99.9% sequence identity to the sequence of SEQ ID NO: 1113 operatively linked to a sequence having at least 50%, 55%, 60%, 65%, 70%, 75%, 80%, 85%, 90%, 95%, 96%, 97%, 98%, 99%, 99.5%, 99.7%, or 99.9% sequence identity to the sequence of SEQ ID NO: 3649; (ii) a second polypeptide chain comprising a sequence having at least 50%, 55%, 60%, 65%, 70%, 75%, 80%, 85%, 90%, 95%, 96%, 97%, 98%, 99%, 99.5%, 99.7%, or 99.9% sequence identity to the sequence of SEQ ID NO: 2270 operatively linked to a sequence having at least 50%, 55%, 60%, 65%, 70%, 75%, 80%, 85%, 90%, 95%, 96%, 97%, 98%, 99%, 99.5%, 99.7%, or 99.9% sequence identity to the sequence of SEQ ID NO: 3794; (iii) a third polypeptide chain comprising a sequence having at least 50%, 55%, 60%, 65%, 70%, 75%, 80%, 85%, 90%, 95%, 96%, 97%, 98%, 99%, 99.5%, 99.7%, or 99.9% sequence identity to the sequence of SEQ ID NO: 3797 operatively linked to a sequence having at least 50%, 55%, 60%, 65%, 70%, 75%, 80%, 85%, 90%, 95%, 96%, 97%, 98%, 99%, 99.5%, 99.7%, or 99.9% sequence identity to the sequence of SEQ ID NO: 3644, or (iv) a combination thereof. In some embodiments, the second polypeptide chain comprises a sequence having at least 50%, 55%, 60%, 65%, 70%, 75%, 80%, 85%, 90%, 95%, 96%, 97%, 98%, 99%, 99.5%, 99.7%, or 99.9% sequence identity to the sequence of SEQ ID NO: 2270 operatively linked to a sequence having at least 50%, 55%, 60%, 65%, 70%, 75%, 80%, 85%, 90%, 95%, 96%, 97%, 98%, 99%, 99.5%, 99.7%, or 99.9% sequence identity to the sequence of SEQ ID NO: 3794 via the sequence of SEQ ID NO: 3308.

[1740] In some embodiments, the multifunctional molecule comprises: (i) a first polypeptide chain comprising the sequence of SEQ ID NO: 1113 and the sequence of SEQ ID NO: 3649; (ii) a second polypeptide chain comprising the sequence of SEQ ID NO: 2270 and the sequence of SEQ ID NO: 3794; (iii) a third polypeptide chain comprising the sequence of SEQ ID NO: 3797 and the sequence of SEQ ID NO: 3644, or (iv) a combination thereof. In some embodiments, the second polypeptide chain further r comprises the sequence of SEQ ID NO: 3308.

[1741] In some embodiments, the multifunctional molecule comprises: (i) a first polypeptide chain comprising the sequence of SEQ ID NO: 1113 operatively linked to the sequence of SEQ ID NO: 3649; (ii) a second polypeptide chain comprising the sequence of SEQ ID NO: 2270 operatively linked to the sequence of SEQ ID NO: 3794; (iii) a third polypeptide chain comprising the sequence of SEQ ID NO: 3797 operatively linked to the sequence of SEQ ID NO: 3644, or (iv) a combination thereof. In some embodiments, the second polypeptide chain comprises the sequence of SEQ ID NO: 2270 operatively linked to the sequence of SEQ ID NO: 3794 via the sequence of SEQ ID NO: 3308.

[1742] In some embodiments, the multifunctional molecule comprises: (i) a first polypeptide chain comprising a sequence having at least 50%, 55%, 60%, 65%, 70%, 75%, 80%, 85%, 90%, 95%, 96%, 97%, 98%, 99%, 99.5%, 99.7%, or 99.9% sequence identity to the sequence of SEQ ID NO: 3795; (ii) a second polypeptide chain comprising a sequence having at least 50%, 55%, 60%, 65%, 70%, 75%, 80%, 85%, 90%, 95%, 96%, 97%, 98%, 99%, 99.5%, 99.7%, or 99.9% sequence identity to the sequence of SEQ ID NO: 3793; (iii) a third polypeptide chain comprising a sequence having at least 50%, 55%, 60%, 65%, 70%, 75%, 80%, 85%, 90%, 95%, 96%, 97%, 98%, 99%, 99.5%, 99.7%, or 99.9% sequence identity to the sequence of SEQ ID NO: 3796, or (iv) a combination thereof.

[1743] In some embodiments, the multifunctional molecule comprises: (i) a first polypeptide chain comprising the sequence of SEQ ID NO: 3791; (ii) a second polypeptide chain comprising the sequence of SEQ ID NO: 3795; (iii) a third polypeptide chain comprising a sequence the sequence of SEQ ID NO: 3796, or (iv) a combination thereof.

[1744] In some embodiments, the multifunctional molecule comprises: (i) a first polypeptide chain comprising a sequence having at least 50%, 55%, 60%, 65%, 70%, 75%, 80%, 85%, 90%, 95%, 96%, 97%, 98%, 99%, 99.5%, 99.7%, or 99.9% sequence identity to the sequence of SEQ ID NO: 1346 and a sequence having at least 50%, 55%, 60%, 65%, 70%, 75%, 80%, 85%, 90%, 95%, 96%, 97%, 98%, 99%, 99.5%, 99.7%, or 99.9% sequence identity to the sequence of SEQ ID NO: 3792; (ii) a second polypeptide chain comprising a sequence having at least 50%, 55%, 60%, 65%, 70%, 75%, 80%, 85%, 90%, 95%, 96%, 97%, 98%, 99%, 99.5%, 99.7%, or 99.9% sequence identity to the sequence of SEQ ID NO: 3799 and a sequence having at least 50%, 55%, 60%, 65%, 70%, 75%, 80%, 85%, 90%, 95%, 96%, 97%, 98%, 99%, 99.5%. 99.7%, or 99.9% sequence identity to the sequence of SEQ ID NO: 3648; (iii) a third polypeptide chain comprising a sequence having at least 50%, 55%, 60%, 65%, 70%, 75%, 80%, 85%, 90%, 95%, 96%, 97%, 98%, 99%, 99.5%, 99.7%, or 99.9% sequence identity to the sequence of SEQ ID NO: 1349 and a sequence having at least 50%, 55%, 60%, 65%, 70%, 75%, 80%, 85%, 90%, 95%, 96%, 97%, 98%, 99%, 99.5%, 99.7%, or 99.9% sequence identity to the sequence of SEQ ID NO: 3644, or (iv) a combination thereof. In some embodiments, the second polypeptide chain further r comprises the sequence of SEQ ID NO: 3308.

[1745] In some embodiments, the multifunctional molecule comprises: (i) a first polypeptide chain comprising a sequence having at least 50%, 55%, 60%, 65%, 70%, 75%, 80%, 85%, 90%, 95%, 96%, 97%, 98%, 99%, 99.5%, 99.7%, or 99.9% sequence identity to the sequence of SEQ ID NO: 1346 operatively linked to a sequence having at least 50%, 55%, 60%, 65%, 70%, 75%, 80%, 85%, 90%, 95%, 96%, 97% 98%, 99%, 99.5%, 99.7%, or 99.9% sequence identity to the sequence of SEQ ID NO: 3792; (ii) a second polypeptide chain comprising a sequence having at least 50%, 55%, 60%, 65%, 70%, 75%, 80%, 85%, 90%, 95%, 96%, 97%, 98%, 99%, 99.5%, 99.7%, or 99.9% sequence identity to the sequence of SEQ ID NO: 3799 operatively linked to a sequence having at least 50%, 55%, 60%, 65%, 70%, 75%, 80%, 85%, 90%, 95%, 96%, 97%, 98%, 99%, 99.5%, 99.7%, or 99.9% sequence identity to the sequence of SEQ ID NO: 3648; (iii) a third polypeptide chain comprising a sequence having at least 50%, 55%, 60%, 65%, 70%, 75%, 80%, 85%, 90%, 95%, 96%, 97%, 98%, 99%, 99.5%, 99.7%, or 99.9% sequence identity to the sequence of SEQ ID NO: 1349 operatively linked to a sequence having at least 50%, 55%, 60%, 65%, 70%, 75%, 80%, 85%, 90%, 95%, 96%, 97%, 98%, 99%, 99.5%, 99.7%, or 99.9% sequence identity to the sequence of SEQ ID NO: 3644, or (iv) a combination thereof. In some embodiments, the second polypeptide chain comprises a sequence having at least 50%, 55%, 60%, 65%, 70%, 75%, 80%, 85%, 90%, 95%, 96%, 97%, 98%, 99%, 99.5%, 99.7%, or 99.9% sequence identity to the sequence of SEQ ID NO: 3799 operatively linked to a sequence having at least 50%, 55%, 60%, 65%, 70%, 75%, 80%, 85%, 90%, 95%, 96%, 97%, 98%, 99%, 99.5%, 99.7%, or 99.9% sequence identity to the sequence of SEQ ID NO: 3648 via the sequence of SEQ ID NO: 3308.

[1746] In some embodiments, the multifunctional molecule comprises: (i) a first polypeptide chain comprising the sequence of SEQ ID NO: 1346 and the sequence of SEQ ID NO: 3792; (ii) a second polypeptide chain comprising the sequence of SEQ ID NO: 3799 and the sequence of SEQ ID NO: 3648; (iii) a third polypeptide chain comprising the sequence of SEQ ID NO: 1349 and the sequence of SEQ ID NO: 3644, or (iv) a combination thereof. In some embodiments, the second polypeptide chain further r comprises the sequence of SEQ ID NO: 3308.

[1747] In some embodiments, the multifunctional molecule comprises: (i) a first polypeptide chain comprising the sequence of SEQ ID NO: 1346 operatively linked to the sequence of SEQ ID NO: 3792; (ii) a second polypeptide chain comprising the sequence of SEQ ID NO: 3799 operatively linked to the sequence of SEQ ID NO: 3648; (iii) a third polypeptide chain comprising the sequence of SEQ ID NO: 1349 operatively linked to the sequence of SEQ ID NO: 3644, or (iv) a combination thereof. In some embodiments, the second polypeptide chain comprises the sequence of SEQ ID NO: 3799 operatively linked to the sequence of SEQ ID NO: 3648 via the sequence of SEQ ID NO: 3308.

[1748] In some embodiments, the multifunctional molecule comprises: (i) a first polypeptide chain comprising a sequence having at least 50%, 55%, 60%, 65%, 70%, 75%, 80%, 85%, 90%, 95%, 96%, 97%, 98%, 99%, 99.5%, 99.7%, or 99.9% sequence identity to the sequence of SEQ ID NO: 3791; (ii) a second polypeptide chain comprising a sequence having at least 50%, 55%, 60%, 65%, 70%, 75%, 80%, 85%, 90%, 95%, 96%, 97%, 98%, 99%, 99.5%, 99.7%, or 99.9% sequence identity to the sequence of SEQ ID NO: 3798; (iii) a third polypeptide chain comprising a sequence having at least 50%, 55%, 60%, 65%, 70%, 75%, 80%, 85%, 90%, 95%, 96%, 97%, 98%, 99%, 99.5%, 99.7%, or 99.9% sequence identity to the sequence of SEQ ID NO: 3518, or (iv) a combination thereof.

[1749] In some embodiments, the multifunctional molecule comprises: (i) a first polypeptide chain comprising the sequence of SEQ ID NO: 3791; (ii) a second polypeptide chain comprising the sequence of SEQ ID NO: 3791; (iii) a third polypeptide chain comprising a sequence the sequence of SEQ ID NO: 3518, or (iv) a combination thereof.

[1750] In some embodiments, the TCRβV-binding moiety comprises: (i) a VH comprising a HC CDR1, a HC CDR2 and a HC CDR3 of SEQ ID NO: 1102, SEQ ID NO. 1103, and SEQ ID NO: 1104, respectively: a HC CDR1, a HC CDR2 and a HC CDR3 of SEQ ID NO: 1105, SEQ ID NO: 1106, and SEQ ID NO: 1104, respectively; or a HC CDR1, a HC CDR2 and a HC CDR3 of SEQ ID NO: 3640, SEQ ID NO: 1103, and SEQ ID NO: 1104, respectively; (ii) a VL comprising a LC CDR1, a LC CDR2, and a LC of SEQ ID NO: SEQ ID NO: 1107, SEQ ID NO: 1108, and SEQ ID NO: 1109, respectively: a LC CDR1, a LC CDR2, and a LC of SEQ ID NO:1110, SEQ ID NO: 1108, and SEQ ID NO: 1109, respectively; or a LC CDR1, a LC CDR2, and a LC of SEQ ID NO:1107, SEQ ID NO: 1108, and SEQ ID NO: 1109, respectively; or (iii) a combination thereof.

[1751] In some embodiments, the TCRβV-binding moiety comprises a VH comprising a sequence having at least 50%, 55%, 60%, 65%, 70%, 75%, 80%, 85%, 90%, 95%, 96%, 97%, 98%, 99%, 99.5%, 99.7%, or 99.9% sequence identity to the sequence of SEQ ID NO: 1113: a VL comprising a sequence having at least 50%, 55%, 60%, 65%, 70%, 75%, 80%, 85%, 90%, 95%, 96%, 97%, 98%, 99%, 99.5%, 99.7%, or 99.9% sequence identity to the sequence of SEQ ID NO: 3797; or a combination thereof.

[1752] In some embodiments, the TCRβV-binding moiety comprises a VH comprising the sequence of SEQ ID NO: 1113: a VL comprising the sequence of SEQ ID NO: 3797; or a combination thereof.

[1753] In some embodiments, an antibody or antigen binding fragment thereof comprises: (i) a VH comprising a HC CDR1, a HC CDR2 and a HC CDR3 of SEQ ID NO: 1102, SEQ ID NO: 1103, and SEQ ID NO: 1104, respectively: a HC CDR1, a HC CDR2 and a HC CDR3 of SEQ ID NO: 1105, SEQ ID NO: 1106, and SEQ ID NO: 1104, respectively; or a HC CDR1, a HC CDR2 and a HC CDR3 of SEQ ID NO: 3640, SEQ ID NO: 1103, and SEQ ID NO: 1104, respectively; (ii) a VL comprising a LC CDR1, a LC CDR2, and a LC of SEQ ID NO: SEQ ID NO: 1107, SEQ ID NO: 1108, and SEQ ID NO: 1109, respectively; a LC CDR1, a LC CDR2, and a LC of SEQ ID NO:1110, SEQ ID NO: 1108, and SEQ ID NO: 1109, respectively; or a LC CDR1, a LC CDR2, and a LC of SEQ ID NO: 1107, SEQ ID NO: 1108, and SEQ ID NO: 1109, respectively; or (iii) a combination thereof.

[1754] In some embodiments, an antibody or antigen binding fragment thereof comprises a VH comprising a sequence having at least 50%, 55%, 60%, 65%, 70%, 75%, 80%, 85%, 90%, 95%, 96%, 97%, 98%, 99%. 99.5%, 99.7%, or 99.9% sequence identity to the sequence of SEQ ID NO: 1113; a VL comprising a sequence having at least 50%, 55%, 60%, 65%, 70%, 75%, 80%, 85%, 90%, 95%, 96%, 97%, 98%, 99%, 99.5%, 99.7%, or 99.9% sequence identity to the sequence of SEQ ID NO: 3797; or a combination thereof.

[1755] In some embodiments, an antibody or antigen binding fragment thereof comprises a VH comprising the sequence of SEQ ID NO: 1113: a VL comprising the sequence of SEQ ID NO: 3797; or a combination thereof.

[1756] In some embodiments, the tumor-associated antigen binding moiety comprises a VH comprising a HC CDR1, a HC CDR2 and a HC CDR3 comprising the sequences of SEQ ID NO: 524, SEQ ID NO: 525, and SEQ ID NO: 526 or sequences thereof with no more than 1, 2, 3, or 4 mutations, such as substitutions, additions, or deletions, respectively, or a VH comprising a HC CDR1, a HC CDR2 and a HC CDR3 comprising the sequences of SEQ ID NO: 538, SEQ ID NO: 539, and SEQ ID NO: 540 or sequences thereof with no more than 1, 2, 3, or 4 mutations, such as substitutions, additions, or deletions, respectively.

[1757] In some embodiments, the tumor-associated antigen binding moiety comprises a VL comprising a LC CDR1, a LC CDR2 and a LC CDR3 comprising the sequences of SEQ ID NO: 1168, SEQ ID NO: 1295, and SEQ ID NO: 528 or sequences thereof with no more than 1, 2, 3, or 4 mutations, such as substitutions, additions, or deletions, respectively, or a VL comprising a LC CDR1, a LC CDR2 and a LC CDR3 comprising the sequences of SEQ ID NO: 562, SEQ ID NO: 563, and SEQ ID NO: 564 or sequences thereof with no more than 1, 2, 3, or 4 mutations, such as substitutions, additions, or deletions, respectively.

[1758] In some embodiments, the tumor-associated antigen binding moiety comprises a VH comprising a HC CDR1, a HC CDR2 and a HC CDR3 comprising the sequences of SEQ ID NO: 524, SEQ ID NO: 525, and SEQ ID NO: 526 or sequences thereof with no more than 1, 2, 3, or 4 mutations, such as substitutions, additions, or deletions, respectively, and a VL comprising a LC CDR1, a LC CDR2 and a LC CDR3 comprising the sequences of SEQ ID NO: 1168, SEQ ID NO: 1295, and SEQ ID NO: 528 or sequences thereof with no more than 1, 2, 3, or 4 mutations, such as substitutions, additions, or deletions, respectively.

[1759] In some embodiments, the tumor-associated antigen binding moiety comprises a VH comprising a HC CDR1, a HC CDR2 and a HC CDR3 comprising the sequences of SEQ ID NO: 538, SEQ ID NO: 539, and SEQ ID NO: 540 or sequences thereof with no more than 1, 2, 3, or 4 mutations, such as substitutions, additions, or deletions, respectively, and a VL comprising a LC CDR1, a LC CDR2 and a LC CDR3 comprising the sequences of SEQ ID NO: 562, SEQ ID NO: 563, and SEQ ID NO: 564 or sequences thereof with no more than 1, 2, 3, or 4 mutations, such as substitutions, additions, or deletions, respectively.

[1760] In some embodiments, the tumor-associated antigen binding moiety comprises a VH comprising a sequence having at least 30%, 35%, 40%, 45%, 50%, 55%, 60%, 65%, 70%, 75%, 80%, 85%, 90%, 95%, 96%, 97%, 98%, 99%, 99.5%, 99.6%, 99.7%, 99.8%, 99.9%, or 100% sequence identity to the sequence of SEQ ID NO: 523 or the sequence of SEQ ID NO: 537.

[1761] In some embodiments, the tumor-associated antigen binding moiety comprises a VL comprising a sequence having at least 30%, 35%, 40%, 45%, 50%, 55%, 60%, 65%, 70%, 75%, 80%, 85%, 90%, 95%, 96%, 97%, 98%, 99%, 99.5%, 99.6%, 99.7%, 99.8%, 99.9%, or 100% sequence identity to the sequence of SEQ ID NO: 527 or the sequence of SEQ ID NO: 561.

[1762] In some embodiments, the tumor-associated antigen binding moiety comprises a VH comprising the sequence of SEQ ID NO: 523 or the sequence of SEQ ID NO: 537.

[1763] In some embodiments, the tumor-associated antigen binding moiety comprises a VL comprising the sequence of SEQ ID NO: 527 or the sequence of SEQ ID NO: 561.

[1764] In some embodiments, the tumor-associated antigen binding moiety comprises a VH comprising a sequence having at least 30%, 35%, 40%, 45%, 50%, 55%, 60%, 65%, 70%, 75%, 80%, 85%, 90%, 95%, 96%, 97%, 98%, 99%, 99.5%, 99.6%, 99.7%, 99.8%, 99.9%, or 100% sequence identity to the sequence of SEQ ID NO: 523 and a VL comprising a sequence having at least 30%, 35%, 40%, 45%, 50%, 55%, 60%, 65%, 70%, 75%, 80%, 85%, 90%, 95%, 96%, 97%, 98%, 99%, 99.5%, 99.6%, 99.7%, 99.8%, 99.9%, or 100% sequence identity to the sequence of SEQ ID NO: 527.

[1765] In some embodiments, the tumor-associated antigen binding moiety comprises a VH comprising the sequence of SEQ ID NO: 523 and a VL comprising the sequence of SEQ ID NO: 527.

[1766] In some embodiments, the tumor-associated antigen binding moiety comprises a VH comprising a sequence having at least 30%, 35%, 40%, 45%, 50%, 55%, 60%, 65%, 70%, 75%, 80%, 85%, 90%, 95%, 96%, 97%, 98%, 99%, 99.5%, 99.6%, 99.7%, 99.8%, 99.9%, or 100% sequence identity to the sequence of SEQ ID NO: 537 and a VL comprising a sequence having at least 30%, 35%, 40%, 45%, 50%, 55%, 60%, 65%, 70%, 75%, 80%, 85%, 90%, 95%, 96%, 97%, 98%, 99%, 99.5%, 99.6%, 99.7%, 99.8%, 99.9%, or 100% sequence identity to the sequence of SEQ ID NO: 561.

[1767] In some embodiments, the tumor-associated antigen binding moiety comprises a VH comprising the sequence of SEQ ID NO: 537 and a VL comprising the sequence of SEQ ID NO: 561.

[1768] In some embodiments, the tumor-associated antigen binding moiety comprises a VH comprising a HC CDR1, a HC CDR2 and a HC CDR3 comprising the sequences of SEQ ID NO: 581, SEQ ID NO: 582, and SEQ ID NO: 583, respectively.

[1769] In some embodiments, the tumor-associated antigen binding moiety comprises a VL comprising a LC CDR1, a LC CDR2 and a LC CDR3 comprising the sequences of SEQ ID NO: 586, SEQ ID NO: 587, and SEQ ID NO: 588, respectively.

[1770] In some embodiments, the tumor-associated antigen binding moiety comprises a VH comprising a HC CDR1, a HC CDR2 and a HC CDR3 comprising the sequences of SEQ ID NO: 581, SEQ ID NO: 582, and SEQ ID NO: 583, respectively, and a VL comprising a LC CDR1, a LC CDR2 and a LC CDR3 comprising the sequences of SEQ ID NO: 586, SEQ ID NO: 587, and SEQ ID NO: 588, respectively.

[1771] In some embodiments, the tumor-associated antigen binding moiety comprises a VH comprising a sequence having at least 30%, 35%, 40%, 45%, 50%, 55%, 60%, 65%, 70%, 75%, 80%, 85%, 90%, 95%, 96%, 97%, 98%, 99%, 99.5%, 99.6%, 99.7%, 99.8%, 99.9%, or 100% sequence identity to the sequence of SEQ ID NO: 580.

[1772] In some embodiments, the tumor-associated antigen binding moiety comprises a VL comprising a sequence having at least 30%, 35%, 40%, 45%, 50%, 55%, 60%, 65%, 70%, 75%, 80%, 85%, 90%, 95%, 96%, 97%, 98%, 99%, 99.5%, 99.6%, 99.7%, 99.8%, 99.9%, or 100% sequence identity to the sequence of SEQ ID NO: 585.

[1773] In some embodiments, the tumor-associated antigen binding moiety comprises a VH comprising the sequence of SEQ ID NO: 580.

[1774] In some embodiments, the tumor-associated antigen binding moiety comprises a VL comprising the sequence of SEQ ID NO: 585.

[1775] In some embodiments, the tumor-associated antigen binding moiety comprises a VH comprising a sequence having at least 30%, 35%, 40%, 45%, 50%, 55%, 60%, 65%, 70%, 75%, 80%, 85%, 90%, 95%, 96%, 97%, 98%, 99%, 99.5%, 99.6%, 99.7%, 99.8%, 99.9%, or 100% sequence identity to the sequence of SEQ ID NO: 580 and a VL comprising a sequence having at least 30%, 35%, 40%, 45%, 50%, 55%, 60%, 65%, 70%, 75%, 80%, 85%, 90%, 95%, 96%, 97%, 98%, 99%, 99.5%, 99.6%, 99.7%, 99.8%, 99.9%, or 100% sequence identity to the sequence of SEQ ID NO: 585.

[1776] In some embodiments, the tumor-associated antigen binding moiety comprises a VH comprising the sequence of SEQ ID NO. 580 and a VL comprising the sequence of SEQ ID NO: 585.

[1777] In some embodiments, the TCRβV-binding moiety comprises a VH comprising a HC CDR1, a HC CDR2 and a HC CDR3 comprising the sequences of SEQ ID NO: 3650, SEQ ID NO: 3651, and SEQ ID NO: 5, respectively, or a VH comprising a HC CDR1, a HC CDR2 and a HC CDR3 comprising the sequences of SEQ ID NO: 542, SEQ ID NO: 543, and SEQ ID NO: 544, respectively.

[1778] In some embodiments, the TCRβV-binding moiety comprises a VL comprising a LC CDR1, a LC CDR2 and a LC CDR3 comprising the sequences of SEQ ID NO: 3655, SEQ ID NO: 3653, and SEQ ID NO: 8, respectively, or a VL comprising a LC CDR1, a LC CDR2 and a LC CDR3 comprising the sequences of SEQ ID NO: 545, SEQ ID NO: 546, and SEQ ID NO: 547, respectively.

[1779] In some embodiments, the TCRβV-binding moiety comprises a VH comprising a HC CDR1, a HC CDR2 and a HC CDR3 comprising the sequences of SEQ ID NO: 3650, SEQ ID NO: 3651, and SEQ ID NO: 5, respectively, and a VL comprising a LC CDR1, a LC CDR2 and a LC CDR3 comprising the sequences of SEQ ID NO: 3655, SEQ ID NO: 3653, and SEQ ID NO: 8, respectively.

[1780] In some embodiments, the TCRβV-binding moiety comprises a VH comprising a HC CDR1, a HC CDR2 and a HC CDR3 comprising the sequences of SEQ ID NO: 542, SEQ ID NO: 543, and SEQ ID NO: 544, respectively, and a VL comprising a LC CDR1, a LC CDR2 and a LC CDR3 comprising the sequences of SEQ ID NO: 545, SEQ ID NO: 546, and SEQ ID NO: 547, respectively.

[1781] In some embodiments, the TCRβV-binding moiety comprises a VH comprising a sequence having at least 30%, 35%, 40%, 45%, 50%, 55%, 60%, 65%, 70%, 75%, 80%, 85%, 90%, 95%, 96%, 97%, 98%, 99%, 99.5%, 99.6%, 99.7%, 99.8%, 99.9%, or 100% sequence identity to the sequence of SEQ ID NO: 1346 or the sequence of SEQ ID NO: 541.

[1782] In some embodiments, the TCRβV-binding moiety comprises a VL comprising a sequence having at least 30%, 35%, 40%, 45%, 50%, 55%, 60%, 65%, 70%, 75%, 80%, 85%, 90%, 95%, 96%, 97%, 98%, 99%, 99.5%, 99.6%, 99.7%, 99.8%, 99.9%, or 100% sequence identity to the sequence of SEQ ID NO: 1349 or the sequence of SEQ ID NO: 3527.

[1783] In some embodiments, the TCRβV-binding moiety comprises a VH comprising the sequence of SEQ ID NO: 1346 or the sequence of SEQ ID NO: 541.

[1784] In some embodiments, the TCRβV-binding moiety comprises a VL comprising the sequence of SEQ ID NO: 1349 or the sequence of SEQ ID NO: 3527.

[1785] In some embodiments, the TCRβV-binding moiety comprises a VH comprising a sequence having at least 30%, 35%, 40%, 45%, 50%, 55%, 60%, 65%, 70%, 75%, 80%, 85%, 90%, 95%, 96%, 97%, 98%, 99%, 99.5%, 99.6%, 99.7%, 99.8%, 99.9%, or 100% sequence identity to the sequence of SEQ ID NO: 1346 and a VL comprising a sequence having at least 30%, 35%, 40%, 45%, 50%, 55%, 60%, 65%, 70%, 75%, 80%, 85%, 90%, 95%, 96%, 97%, 98%, 99%, 99.5%, 99.6%, 99.7%, 99.8%, 99.9%, or 100% sequence identity to the sequence of SEQ ID NO: 1349.

[1786] In some embodiments, the TCRβV-binding moiety comprises a VH comprising the sequence of SEQ ID NO: 1346 and a VL comprising the sequence of SEQ ID NO: 1349.

[1787] In some embodiments, the TCRβV-binding moiety comprises a VH comprising a sequence having at least 30%, 35%, 40%, 45%, 50%, 55%, 60%, 65%, 70%, 75%, 80%, 85%, 90%, 95%, 96%, 97%, 98%, 99%, 99.5%, 99.6%, 99.7%, 99.8%, 99.9%, or 100% sequence identity to the sequence of SEQ ID NO: 541 and a VL comprising a sequence having at least 70% sequence identity the sequence of SEQ ID NO: 3527.

[1788] In some embodiments, the TCRβV-binding moiety comprises a VH comprising the sequence of SEQ ID NO: 541 and a VL comprising the sequence of SEQ ID NO: 3527.

[1789] In some embodiments, the TCRβV-binding moiety comprises an scFv comprising the sequence of SEQ ID NO: 1346 operatively linked to the sequence of SEQ ID NO: 1349 via a linker comprising the sequence of SEQ ID NO: 3801.

[1790] In some embodiments, the TCRβV-binding moiety comprises an scFv comprising the sequence of SEQ ID NO: 541 operatively linked to the sequence of SEQ ID NO: 3527 via a linker comprising the sequence of SEQ ID NO: 3801.

[1791] In some embodiments, the TCRβV-binding moiety comprises an scFv comprising a sequence having at least 30%, 35%, 40%, 45%, 50%, 55%, 60%, 65%, 70%, 75%, 80%, 85%, 90%, 95%, 96%, 97%, 98%, 99%, 99.5%, 99.6%, 99.7%, 99.8%, 99.9%, or 100% sequence identity to the sequence of SEQ ID NO: 1331 or the sequence of SEQ ID NO: 1376.

[1792] In some embodiments, the TCRβV-binding moiety comprises an scFv comprising the sequence of SEQ ID NO: 1331 or the sequence of SEQ ID NO: 1376.

[1793] In some embodiments, the multifunctional molecule consists of a first polypeptide chain, a second polypeptide chain, and a third polypeptide chain, wherein:
[1794] (i) the first polypeptide chain comprises the sequence of SEQ ID NO: 523, and the sequence of SEQ ID NO: 3649;
[1795] (ii) the second polypeptide chain comprises the sequence of SEQ ID NO: 1331, the sequence of SEQ ID NO: 2270, and the sequence of SEQ ID NO: 3648, and
[1796] (iii) the third polypeptide chain comprises the sequence of SEQ ID NO: 527, and the sequence of SEQ ID NO: 3644.

[1797] In some embodiments, the multifunctional molecule consists of a first polypeptide chain, a second polypeptide chain, and a third polypeptide chain, wherein:
[1798] (i) the first polypeptide chain comprises the sequence of SEQ ID NO: 523 operatively linked to the sequence of SEQ ID NO: 3649;
[1799] (ii) the second polypeptide chain comprises the sequence of SEQ ID NO: 1331 operatively linked to the sequence of SEQ ID NO. 2270 operatively linked to the sequence of SEQ ID NO: 3648; and
[1800] (iii) the third polypeptide chain comprises the sequence of SEQ ID NO: 527 operatively linked to the sequence of SEQ ID NO: 3644.

[1801] In some embodiments, the multifunctional molecule consists of a first polypeptide chain, a second polypeptide chain, and a third polypeptide chain, wherein:
[1802] (i) the first polypeptide chain comprises a sequence having at least 30%, 35%, 40%, 45%, 50%, 55%, 60%, 65%, 70%, 75%, 80%, 85%, 90%, 95%, 96%, 97%, 98%, 99%, 99.5%, 99.6%, 99.7%, 99.8%, 99.9%, or 100% sequence identity to the sequence of SEQ ID NO: 501;
[1803] (ii) the second polypeptide chain comprises a sequence having at least 30%, 35%, 40%, 45%, 50%, 55%, 60%, 65%, 70%, 75%, 80%, 85%, 90%, 95%, 96%, 97%, 98%, 99%, 99.5%, 99.6%, 99.7%, 99.8%, 99.9%, or 100% sequence identity to the sequence of SEQ ID NO: 3800; and
[1804] (iii) the third polypeptide chain comprises a sequence having at least 30%, 35%, 40%, 45%, 50%, 55%, 60%, 65%, 70%, 75%, 80%, 85%, 90%, 95%, 96%, 97%, 98%, 99%, 99.5%, 99.6%, 99.7%, 99.8%, 99.9%, or 100% sequence identity to the sequence of SEQ ID NO: 502.

[1805] In some embodiments, the multifunctional molecule consists of a first polypeptide chain, a second polypeptide chain, and a third polypeptide chain, wherein:
[1806] (i) the first polypeptide chain comprises the sequence of SEQ ID NO: 501;
[1807] (ii) the second polypeptide chain comprises the sequence of SEQ ID NO: 3800; and
[1808] (iii) the third polypeptide chain comprises the sequence of SEQ ID NO: 502.

[1809] In some embodiments, the multifunctional molecule consists of a first polypeptide chain, a second polypeptide chain, and a third polypeptide chain, wherein:
[1810] (i) the first polypeptide chain comprises a first sequence of SEQ ID NO: 523, a second sequence of SEQ ID NO: 523, and the sequence of SEQ ID NO: 3649;
[1811] (ii) the second polypeptide chain comprises the sequence of SEQ ID NO: 1331, the sequence of SEQ ID NO: 2270, and the sequence of SEQ ID NO: 3648; and
[1812] (iii) the third polypeptide chain comprises the sequence of SEQ ID NO: 527, and the sequence of SEQ ID NO: 3644.

[1813] In some embodiments, the multifunctional molecule consists of a first polypeptide chain, a second polypeptide chain, and a third polypeptide chain, wherein:
[1814] (i) the first polypeptide chain comprises the first sequence of SEQ ID NO: 523 operatively linked to the second sequence of SEQ ID NO: 523 operatively linked to the sequence of SEQ ID NO: 3649;
[1815] (ii) the second polypeptide chain comprises the sequence of SEQ ID NO: 1331 operatively linked to the sequence of SEQ ID NO: 2270 operatively linked to the sequence of SEQ ID NO: 3648; and
[1816] (iii) the third polypeptide chain comprises the sequence of SEQ ID NO: 527 operatively linked to the sequence of SEQ ID NO. 3644.

[1817] In some embodiments, the multifunctional molecule consists of a first polypeptide chain, a second polypeptide chain, and a third polypeptide chain, wherein:
[1818] (i) the first polypeptide chain comprises a sequence having at least 30%, 35%, 40%, 45%, 50%, 55%, 60%, 65%, 70%, 75%, 80%, 85%, 90%, 95%, 96%, 97%, 98%, 99%, 99.5%, 99.6%, 99.7%, 99.8%, 99.9%, or 100% sequence identity to the sequence of SEQ ID NO: 590;
[1819] (ii) the second polypeptide chain comprises a sequence having at least 30%, 35%, 40%, 45%, 50%, 55%, 60%, 65%, 70%, 75%, 80%, 85%, 90%, 95%, 96%, 97%, 98%, 99%, 99.5%, 99.6%, 99.7%, 99.8%, 99.9%, or 100% sequence identity to the sequence of SEQ ID NO: 3800; and
[1820] (iii) the third polypeptide chain comprises a sequence having at least 30%, 35%, 40%, 45%, 50%, 55%, 60%, 65%, 70%, 75%, 80%, 85%, 90%, 95%, 96%, 97%, 98%, 99%, 99.5%, 99.6%, 99.7%, 99.8%, 99.9%, or 100% sequence identity to the sequence of SEQ ID NO: 502.

[1821] In some embodiments, the multifunctional molecule consists of a first polypeptide chain, a second polypeptide chain, and a third polypeptide chain, wherein:
[1822] (i) the first polypeptide chain comprises the sequence of SEQ ID NO: 590;
[1823] (ii) the second polypeptide chain comprises the sequence of SEQ ID NO: 3800; and
[1824] (iii) the third polypeptide chain comprises the sequence of SEQ ID NO: 502.

[1825] In some embodiments, the multifunctional molecule consists of a first polypeptide chain, a second polypeptide chain, and a third polypeptide chain, wherein:
[1826] (i) the first polypeptide chain comprises the sequence of SEQ ID NO: 537, and the sequence of SEQ ID NO: 559;
[1827] (ii) the second polypeptide chain comprises the sequence of SEQ ID NO: 1376, the sequence of SEQ ID NO: 2191, and the sequence of SEQ ID NO: 3533; and
[1828] (iii) the third polypeptide chain comprises the sequence of SEQ ID NO: 561, and the sequence of SEQ ID NO: 558.

[1829] In some embodiments, the multifunctional molecule consists of a first polypeptide chain, a second polypeptide chain, and a third polypeptide chain, wherein:
[1830] (i) the first polypeptide chain comprises the sequence of SEQ ID NO: 537 operatively linked to the sequence of SEQ ID NO: 559;
[1831] (ii) the second polypeptide chain comprises the sequence of SEQ ID NO: 1376 operatively linked to the sequence of SEQ ID NO: 2191 operatively linked to the sequence of SEQ ID NO: 3533; and
[1832] (iii) the third polypeptide chain comprises the sequence of SEQ ID NO: 561 operatively linked to the sequence of SEQ ID NO: 558.

[1833] In some embodiments, the multifunctional molecule consists of a first polypeptide chain, a second polypeptide chain, and a third polypeptide chain, wherein:
[1834] (i) the first polypeptide chain comprises a sequence having at least 30%, 35%, 40%, 45%, 50%, 55%, 60%, 65%, 70%, 75%, 80%, 85%, 90%, 95%, 96%, 97%, 98%, 99%, 99.5%, 99.6%, 99.7%, 99.8%, 99.9%, or 100% sequence identity to the sequence of SEQ ID NO: 509;
[1835] (ii) the second polypeptide chain comprises a sequence having at least 30%, 35%, 40%, 45%, 50%, 55%, 60%, 65%, 70%, 75%, 80%, 85%, 90%, 95%, 96%, 97%, 98%, 99%, 99.5%, 99.6%, 99.7%, 99.8%, 99.9%, or 100% sequence identity to the sequence of SEQ ID NO: 511; and
[1836] (iii) the third polypeptide chain comprises a sequence having at least 30%, 35%, 40%, 45%, 50%, 55%, 60%, 65%, 70%, 75%, 80%, 85%, 90%, 95%, 96%, 97%, 98%, 99%, 99.5%, 99.6%, 99.7%, 99.8%, 99.9%, or 100% sequence identity to the sequence of SEQ ID NO: 510.

[1837] In some embodiments, the multifunctional molecule consists of a first polypeptide chain, a second polypeptide chain, and a third polypeptide chain, wherein:
[1838] (i) the first polypeptide chain comprises the sequence of SEQ ID NO: 509;
[1839] (ii) the second polypeptide chain comprises the sequence of SEQ ID NO: 511; and
[1840] (iii) the third polypeptide chain comprises the sequence of SEQ ID NO: 510.

[1841] In some embodiments, the multifunctional molecule consists of a first polypeptide chain, a second polypeptide chain, and a third polypeptide chain, wherein:
[1842] (i) the first polypeptide chain comprises a first sequence of SEQ ID NO: 537, a second sequence of SEQ ID NO: 537, and the sequence of SEQ ID NO: 559;
[1843] (ii) the second polypeptide chain comprises the sequence of SEQ ID NO: 1376, the sequence of SEQ ID NO: 2191, and the sequence of SEQ ID NO: 3533; and
[1844] (iii) the third polypeptide chain comprises the sequence of SEQ ID NO: 561, and the sequence of SEQ ID NO: 558.

[1845] In some embodiments, the multifunctional molecule consists of a first polypeptide chain, a second polypeptide chain, and a third polypeptide chain, wherein:
[1846] (i) the first polypeptide chain comprises the first sequence of SEQ ID NO: 537 operatively linked to the second sequence of SEQ ID NO: 537 operatively linked to the sequence of SEQ ID NO: 559;
[1847] (ii) the second polypeptide chain comprises the sequence of SEQ ID NO: 1376 operatively linked to the sequence of SEQ ID NO: 2191 operatively linked to the sequence of SEQ ID NO: 3533; and
[1848] (iii) the third polypeptide chain comprises the sequence of SEQ ID NO: 561 operatively linked to the sequence of SEQ ID NO: 558.

[1849] In some embodiments, the multifunctional molecule consists of a first polypeptide chain, a second polypeptide chain, and a third polypeptide chain, wherein:
[1850] (i) the first polypeptide chain comprises a sequence having at least 30%, 35%, 40%, 45%, 50%, 55%, 60%, 65%, 70%, 75%, 80%, 85%, 90%, 95%, 96%, 97%, 98%, 99%, 99.5%, 99.6%, 99.7%, 99.8%, 99.9%, or 100% sequence identity to the sequence of SEQ ID NO: 512;
[1851] (ii) the second polypeptide chain comprises a sequence having at least 30%, 35%, 40%, 45%, 50%, 55%, 60%, 65%, 70%, 75%, 80%, 85%, 90%, 95%, 96%, 97%, 98%, 99%, 99.5%, 99.6%, 99.7%, 99.8%, 99.9%, or 100% sequence identity to the sequence of SEQ ID NO: 511; and
[1852] (iii) the third polypeptide chain comprises a sequence having at least 30%, 35%, 40%, 45%, 50%, 55%, 60%, 65%, 70%, 75%, 80%, 85%, 90%, 95%, 96%, 97%, 98%, 99%, 99.5%, 99.6%, 99.7%, 99.8%, 99.9%, or 100% sequence identity to the sequence of SEQ ID NO: 510.

[1853] In some embodiments, the multifunctional molecule consists of a first polypeptide chain, a second polypeptide chain, and a third polypeptide chain, wherein:
[1854] (i) the first polypeptide chain comprises the sequence of SEQ ID NO: 512;
[1855] (ii) the second polypeptide chain comprises the sequence of SEQ ID NO: 511; and
[1856] (iii) the third polypeptide chain comprises the sequence of SEQ ID NO: 510.

[1857] In some embodiments, the multifunctional molecule consists of a first polypeptide chain, a second polypeptide chain, and a third polypeptide chain, wherein:
[1858] (i) the first polypeptide chain comprises the sequence of SEQ ID NO: 580, and the sequence of SEQ ID NO: 584;
[1859] (ii) the second polypeptide chain comprises the sequence of SEQ ID NO: 1376, the sequence of SEQ ID NO: 2191, and the sequence of SEQ ID NO: 3533; and
[1860] (iii) the third polypeptide chain comprises the sequence of SEQ ID NO: 585, and the sequence of SEQ ID NO: 3528.

[1861] In some embodiments, the multifunctional molecule consists of a first polypeptide chain, a second polypeptide chain, and a third polypeptide chain, wherein:
[1862] (i) the first polypeptide chain comprises the sequence of SEQ ID NO: 580 operatively linked to the sequence of SEQ ID NO: 584;
[1863] (ii) the second polypeptide chain comprises the sequence of SEQ ID NO: 1376 operatively linked to the sequence of SEQ ID NO: 2191 operatively linked to the sequence of SEQ ID NO: 3533; and
[1864] (iii) the third polypeptide chain comprises the sequence of SEQ ID NO: 585 operatively linked to the sequence of SEQ ID NO: 3528.

[1865] In some embodiments, the multifunctional molecule consists of a first polypeptide chain, a second polypeptide chain, and a third polypeptide chain, wherein:
[1866] (i) the first polypeptide chain comprises a sequence having at least 30%, 35%, 40%, 45%, 50%, 55%, 60%, 65%, 70%, 75%, 80%, 85%, 90%, 95%, 96%, 97%, 98%, 99%, 99.5%, 99.6%, 99.7%, 99.8%, 99.9%, or 100% sequence identity to the sequence of SEQ ID NO: 519;
[1867] (ii) the second polypeptide chain comprises a sequence having at least 30%, 35%, 40%, 45%, 50%, 55%, 60%, 65%, 70%, 75%, 80%, 85%, 90%, 95%, 96%, 97%, 98%, 99%, 99.5%, 99.6%, 99.7%, 99.8%, 99.9%, or 100% sequence identity to the sequence of SEQ ID NO: 511; and
[1868] (iii) the third polypeptide chain comprises a sequence having at least 30%, 35%, 40%, 45%, 50%, 55%, 60%, 65%, 70%, 75%, 80%, 85%, 90%, 95%, 96%, 97%, 98%, 99%, 99.5%, 99.6%, 99.7%, 99.8%, 99.9%, or 100% sequence identity to the sequence of SEQ ID NO: 520.

[1869] In some embodiments, the multifunctional molecule consists of a first polypeptide chain, a second polypeptide chain, and a third polypeptide chain, wherein:
[1870] (i) the first polypeptide chain comprises the sequence of SEQ ID NO: 519;
[1871] (ii) the second polypeptide chain comprises the sequence of SEQ ID NO: 511; and
[1872] (iii) the third polypeptide chain comprises the sequence of SEQ ID NO: 520.

[1873] In some embodiment, the multifunctional molecule as provided herein is Tristar molecule comprising a tumor-associated antigen binding moiety, at least one cytokine molecule or a functional fragment or functional variant thereof, and a TCRβV-binding moiety covalently linked to the at least one cytokine molecule or a functional fragment or functional variant thereof.

[1874] In some embodiments, the tumor-associated antigen binding moiety comprises an antibody or antigen binding fragment thereof, wherein the antigen binding fragment comprises any one selected from the group consisting of a Fab, a F(ab′)2, an Fv, a single chain Fv (scFv), a single domain antibody, a diabody (dAb), a camelid antibody, and a combination thereof.

[1875] In some embodiments, the tumor-associated antigen binding moiety comprises a VH comprising a HC CDR1, a HC CDR2 and a HC CDR3 comprising any one of the HC CDR1 sequences, any one of the HC CDR2 sequences, and any one of the HC CDR3 sequences listed in Table 22 or sequences thereof with no more than 1, 2, 3, or 4 mutations, such as substitutions, additions, or deletions. In some embodiments, the tumor-associated antigen binding moiety comprises a VL comprising a LC CDR1, a LC CDR2 and a LC CDR3 comprising any one of the LC CDR1 sequences, any one of the LC CDR2 sequences, and any one of the LC CDR3 sequences listed in Table 22 or sequences thereof with no more than 1, 2, 3, or 4 mutations, such as substitutions, additions, or deletions.

[1876] In some embodiments, the tumor-associated antigen binding moiety comprises a VH comprising a sequence having at least 30%, 35%, 40%, 45%, 50%, 55%, 60%, 65%, 70%, 75%, 80%, 85%, 90%, 95%, 96%, 97%, 98%, 99%, 99.5%, 99.6%, 99.7%, 99.8%, 99.9%, or 100% sequence identity to any one of the VH sequences listed in Table 22. In some embodiments, the tumor-associated antigen binding moiety comprises a VL comprising a sequence having at least 30%, 35%, 40%, 45%, 50%, 55%, 60%, 65%, 70%, 75%, 80%, 85%, 90%, 95%, 96%, 97%, 98%, 99%, 99.5%, 99.6%, 99.7%, 99.8%, 99.9%, or 100% sequence identity to any one of the VL sequences listed in Table 22. In some embodiments, the tumor-associated antigen binding moiety comprises a VH comprising any one of the VH sequences listed in Table 22. In some embodiments, the tumor-associated antigen binding moiety comprises a VL comprising any one of the VL sequences listed in Table 22.

[1877] In some embodiments, the TCRβV-binding moiety comprises an antibody or antigen binding fragment thereof, wherein the antigen binding fragment comprises any one selected from the group consisting of a Fab, a F(ab′)2, an Fv, a single chain Fv (scFv), a single domain antibody, a diabody (dAb), a camelid antibody, and a combination thereof.

[1878] In some embodiments, the TCRβV-binding moiety comprises a VH comprising a HC CDR1, a HC CDR2 and a HC CDR3 comprising any one of the HC CDR1 sequences, any one of the HC CDR2 sequences, and any one of the HC CDR3 sequences listed in Table 22 or sequences thereof with no more than 1, 2, 3, or 4 mutations, such as substitutions, additions, or deletions. In some embodiments, the TCRβV-binding moiety comprises a VL comprising a LC CDR1, a LC CDR2 and a LC CDR3 comprising any one of the LC CDR1 sequences, any one of the LC CDR2 sequences, and any one of the LC CDR3 sequences listed in Table 22 or sequences thereof with no more than 1, 2, 3, or 4 mutations, such as substitutions, additions, or deletions.

[1879] In some embodiments, the TCRβV-binding moiety comprises a VH comprising a sequence having at least 30%, 35%, 40%, 45%, 50%, 55%, 60%, 65%, 70%, 75%, 80%, 85%, 90%, 95%, 96%, 97%, 98%, 99%, 99.5%, 99.6%, 99.7%, 99.8%, 99.9%, or 100% sequence identity to any one of the VH sequences listed in Table 22. In some embodiments, the TCRβV-binding moiety comprises a VL comprising a sequence having at least 30%, 35%, 40%, 45%, 50%, 55%, 60%, 65%, 70%, 75%, 80%, 85%, 90%, 95%, 96%, 97%, 98%, 99%, 99.5%, 99.6%, 99.7%, 99.8%, 99.9%, or 100% sequence identity to any one of the VL sequences listed in Table 22. In some embodiments, the TCRβV-binding moiety comprises a VH comprising any one of the VH sequences listed in Table 22. In some embodiments, the TCRβV-binding moiety comprises a VL comprising any one of the VL sequences listed in Table 22.

[1880] In some embodiments, the at least one cytokine molecule or a functional fragment or functional variant thereof comprises a sequence having at least 30%, 35%, 40%, 45%, 50%, 55%, 60%, 65%, 70%, 75%, 80%, 85%, 90%, 95%, 96%, 97%, 98%, 99%, 99.5%, 99.6%, 99.7%, 99.8%, 99.9%, or 100% sequence identity to any one of the cytokine sequences listed in Table 22. In some embodiments, the at least one cytokine molecule or a functional fragment or functional variant thereof comprises any one of the cytokine sequences listed in Table 22.

[1881] In some embodiments, the multifunctional molecule comprises one or more components comprising sequence having at least 30%, 35%, 40%, 45%, 50%, 55%, 60%, 65%, 70%, 75%, 80%, 85%, 90%, 95%, 96%, 97%, 98%, 99%, 99.5%, 99.6%, 99.7%, 99.8%, 99.9%, or 100% sequence identity to any one of the components listed in Table 22, or any combination thereof.

[1882] In some embodiments, the multifunctional molecule comprises one or more polypeptide chains comprising sequences having at least 30%, 35%, 40%, 45%, 50%, 55%, 60%, 65%, 70%, 75%, 80%, 85%, 90%, 95%, 96%, 97%, 98%, 99%, 99.5%, 99.6%, 99.7%, 99.8%, 99.9%, or 100% sequence identity to any one of the polypeptide chain sequences listed in Table 22, or any combination thereof.

[1883] In some embodiments, the multifunctional molecule comprises one or more components listed in Table 22, or any combination thereof. In some embodiments, the multifunctional molecule comprises one or more polypeptide chains listed in Table 22, or any combination thereof.

[1884] In another aspect, provided herein is a multifunctional molecule that is a T-cell engager (TCE) comprising a tumor-associated antigen binding moiety and a TCRβV-binding moiety. In some embodiments, the tumor-associated antigen binding moiety comprises a VH comprising a HC CDR1, a HC CDR2 and a HC CDR3 comprising any one of the HC CDR1 sequences, any one of the HC CDR2 sequences, and any one of the HC CDR3 sequences listed in Table 22 or sequences thereof with no more than 1, 2, 3, or 4 mutations, such as substitutions, additions, or deletions.

[1885] In some embodiments, the tumor-associated antigen binding moiety comprises a VL comprising a LC CDR1, a LC CDR2 and a LC CDR3 comprising any one of the LC CDR1 sequences, any one of the LC CDR2 sequences, and any one of the LC CDR3 sequences listed in Table 22 or sequences thereof with no more than 1, 2, 3, or 4 mutations, such as substitutions, additions, or deletions.

[1886] In some embodiments, the tumor-associated antigen binding moiety comprises a VH comprising a sequence having at least 30%, 35%, 40%, 45%, 50%, 55%, 60%, 65%, 70%, 75%, 80%, 85%, 90%, 95%, 96%, 97%, 98%, 99%, 99.5%, 99.6%, 99.7%, 99.8%, 99.9%, or 100% sequence identity to any one of the VH sequences listed in Table 22. In some embodiments, the tumor-associated antigen binding moiety comprises a VL comprising a sequence having at least 30%, 35%, 40%, 45%, 50%, 55%, 60%, 65%, 70%, 75%, 80%, 85%, 90%, 95%, 96%, 97%, 98%, 99%, 99.5%, 99.6%, 99.7%, 99.8%, 99.9%, or 100% sequence identity to any one of the VL sequences listed in Table 22. In some embodiments, the tumor-associated antigen binding moiety comprises a VH comprising any one of the VH sequences listed in Table 22. In some embodiments, the tumor-associated antigen binding moiety comprises a VL comprising any one of the VL sequences listed in Table 22.

[1887] In some embodiments, the TCRβV-binding moiety comprises an antibody or antigen binding fragment thereof, wherein the antigen binding fragment comprises any one selected from the group consisting of a Fab, a F(ab′)2, an Fv, a single chain Fv (scFv), a single domain antibody, a diabody (dAb), a camelid antibody, and a combination thereof.

[1888] In some embodiments, the TCRβV-binding moiety comprises a VH comprising a HC CDR1, a HC CDR2 and a HC CDR3 comprising any one of the HC CDR1 sequences, any one of the HC CDR2 sequences, and any one of the HC CDR3 sequences listed in Table 22 or sequences thereof with no more than 1, 2, 3, or 4 mutations, such as substitutions, additions, or deletions. In some embodiments, the TCRβV-binding moiety comprises a VL comprising a LC CDR1, a LC CDR2 and a LC CDR3 comprising any one of the LC CDR1 sequences, any one of the LC CDR2 sequences, and any one of the LC CDR3 sequences listed in Table 22 or sequences thereof with no more than 1, 2, 3, or 4 mutations, such as substitutions, additions, or deletions.

[1889] In some embodiments, the TCRβV-binding moiety comprises a VH comprising a sequence having at least 30%, 35%, 40%, 45%, 50%, 55%, 60%, 65%, 70%, 75%, 80%, 85%, 90%, 95%, 96%, 97%, 98%, 99%, 99.5%, 99.6%, 99.7%, 99.8%, 99.9%, or 100% sequence identity to any one of the VH sequences listed in Table 22. In some embodiments, the TCRβV-binding moiety comprises a VL comprising a sequence having at least 30%, 35%, 40%, 45%, 50%, 55%, 60%, 65%, 70%, 75%, 80%, 85%, 90%, 95%, 96%, 97%, 98%, 99%, 99.5%, 99.6%, 99.7%, 99.8%, 99.9%, or 100% sequence identity to any one of the VL sequences listed in Table 22. In some embodiments, the TCRβV-binding moiety comprises a VH comprising any one of the VH sequences listed in Table 22. In some embodiments, the TCRβV-binding moiety comprises a VL comprising any one of the VL sequences listed in Table 22.

[1890] In some embodiments, the multifunctional molecule comprises one or more components comprising sequence having at least 30%, 35%, 40%, 45%, 50%, 55%, 60%, 65%, 70%, 75%, 80%, 85%, 90%, 95%, 96%, 97%, 98%, 99%, 99.5%, 99.6%, 99.7%, 99.8%, 99.9%, or 100% sequence identity to any one of the components listed in Table 22, or any combination thereof.

[1891] In some embodiments, the multifunctional molecule comprises one or more polypeptide chains comprising sequences having at least 30%, 35%, 40%, 45%, 50%, 55%, 60%, 65%, 70%, 75%, 80%, 85%, 90%, 95%, 96%, 97%, 98%, 99%, 99.5%, 99.6%, 99.7%, 99.8%, 99.9%, or 100% sequence identity to any one of the polypeptide chain sequences listed in Table 22, or any combination thereof.

[1892] In some embodiments, the multifunctional molecule comprises one or more components listed in Table 22, or any combination thereof. In some embodiments, the multifunctional molecule comprises one or more polypeptide chains listed in Table 22, or any combination thereof.

[1893] In some embodiments, the multifunctional molecule consists of a first polypeptide chain, a second polypeptide chain, and a third polypeptide chain, wherein:
[1894] (i) the first polypeptide chain comprises a sequence having at least 30%, 35%, 40%, 45%, 50%, 55%, 60%, 65%, 70%, 75%, 80%, 85%, 90%, 95%, 96%, 97%, 98%, 99%, 99.5%, 99.6%, 99.7%, 99.8%, 99.9%, or 100% sequence identity to the sequence of SEQ ID NO: 501;
[1895] (ii) the second polypeptide chain comprises a sequence having at least 30%, 35%, 40%, 45%, 50%, 55%, 60%, 65%, 70%, 75%, 80%, 85%, 90%, 95%, 96%, 97%, 98%, 99%, 99.5%, 99.6%, 99.7%, 99.8%, 99.9%, or 100% sequence identity to the sequence of SEQ ID NO: 503; and
[1896] (iii) the third polypeptide chain comprises a sequence having at least 30%, 35%, 40%, 45%, 50%, 55%, 60%, 65%, 70%, 75%, 80%, 85%, 90%, 95%, 96%, 97%, 98%, 99%, 99.5%, 99.6%, 99.7%, 99.8%, 99.9%, or 100% sequence identity to the sequence of SEQ ID NO: 502.

[1897] In some embodiments, the multifunctional molecule consists of a first polypeptide chain, a second polypeptide chain, and a third polypeptide chain, wherein:
[1898] (i) the first polypeptide chain comprises the sequence of SEQ ID NO: 501;
[1899] (ii) the second polypeptide chain comprises the sequence of SEQ ID NO: 503; and
[1900] (iii) the third polypeptide chain comprises the sequence of SEQ ID NO: 502.

[1901] In some embodiments, the multifunctional molecule consists of a first polypeptide chain, a second polypeptide chain, a third polypeptide chain, and a fourth polypeptide chain wherein:
[1902] (i) the first polypeptide chain comprises a sequence having at least 30%, 35%, 40%, 45%, 50%, 55%, 60%, 65%, 70%, 75%, 80%, 85%, 90%, 95%, 96%, 97%, 98%, 99%, 99.5%, 99.6%, 99.7%, 99.8%, 99.9%, or 100% sequence identity to the sequence of SEQ ID NO: 504;
[1903] (ii) the second polypeptide chain comprises a sequence having at least 30%, 35%, 40%, 45%, 50%, 55%, 60%, 65%, 70%, 75%, 80%, 85%, 90%, 95%, 96%, 97%, 98%, 99%, 99.5%, 99.6%, 99.7%, 99.8%, 99.9%, or 100% sequence identity to the sequence of SEQ ID NO: 504;
[1904] (iii) the third polypeptide chain comprises a sequence having at least 30%, 35%, 40%, 45%, 50%, 55%, 60%, 65%, 70%, 75%, 80%, 85%, 90%, 95%, 96%, 97%, 98%, 99%, 99.5%, 99.6%, 99.7%, 99.8%, 99.9%, or 100% sequence identity to the sequence of SEQ ID NO: 502; and
[1905] (iv) the fourth polypeptide chain comprises a sequence having at least 30%, 35%, 40%, 45%, 50%, 55%, 60%, 65%, 70%, 75%, 80%, 85%, 90%, 95%, 96%, 97%, 98%, 99%, 99.5%, 99.6%, 99.7%, 99.8%, 99.9%, or 100% sequence identity to the sequence of SEQ ID NO: 502.

[1906] In some embodiments, the multifunctional molecule consists of a first polypeptide chain, a second polypeptide chain, a third polypeptide chain, and a fourth polypeptide chain wherein:
[1907] (i) the first polypeptide chain comprises the sequence of SEQ ID NO: 504;
[1908] (ii) the second polypeptide chain comprises the sequence of SEQ ID NO: 504;
[1909] (iii) the third polypeptide chain comprises the sequence of SEQ ID NO: 502; and
[1910] (iv) the fourth polypeptide chain comprises the sequence of SEQ ID NO: 502.

[1911] In some embodiments, the multifunctional molecule consists of a first polypeptide chain, a second polypeptide chain, a third polypeptide chain, and a fourth polypeptide chain wherein:
[1912] (i) the first polypeptide chain comprises a sequence having at least 30%, 35%, 40%, 45%, 50%, 55%, 60%, 65%, 70%, 75%, 80%, 85%, 90%, 95%, 96%, 97%, 98%, 99%, 99.5%, 99.6%, 99.7%, 99.8%, 99.9%, or 100% sequence identity to the sequence of SEQ ID NO: 508;
[1913] (ii) the second polypeptide chain comprises a sequence having at least 30%, 35%, 40%, 45%, 50%, 55%, 60%, 65%, 70%, 75%, 80%, 85%, 90%, 95%, 96%, 97%, 98%, 99%, 99.5%, 99.6%, 99.7%, 99.8%, 99.9%, or 100% sequence identity to the sequence of SEQ ID NO: 506;
[1914] (iii) the third polypeptide chain comprises a sequence having at least 30%, 35%, 40%, 45%, 50%, 55%, 60%, 65%, 70%, 75%, 80%, 85%, 90%, 95%, 96%, 97%, 98%, 99%, 99.5%, 99.6%, 99.7%, 99.8%, 99.9%, or 100% sequence identity to the sequence of SEQ ID NO: 502; and
[1915] (iv) the fourth polypeptide chain comprises a sequence having at least 30%, 35%, 40%, 45%, 50%, 55%, 60%, 65%, 70%, 75%, 80%, 85%, 90%, 95%, 96%, 97%, 98%, 99%, 99.5%, 99.6%, 99.7%, 99.8%, 99.9%, or 100% sequence identity to the sequence of SEQ ID NO: 507.

[1916] In some embodiments, the multifunctional molecule consists of a first polypeptide chain, a second polypeptide chain, a third polypeptide chain, and a fourth polypeptide chain wherein:
[1917] (i) the first polypeptide chain comprises the sequence of SEQ ID NO: 508;
[1918] (ii) the second polypeptide chain comprises the sequence of SEQ ID NO: 506;
[1919] (iii) the third polypeptide chain comprises the sequence of SEQ ID NO: 502; and
[1920] (iv) the fourth polypeptide chain comprises the sequence of SEQ ID NO: 507.

[1921] In some embodiments, the multifunctional molecule consists of a first polypeptide chain, a second polypeptide chain, and a third polypeptide chain, wherein:
[1922] (i) the first polypeptide chain comprises a sequence having at least 30%, 35%, 40%, 45%, 50%, 55%, 60%, 65%, 70%, 75%, 80%, 85%, 90%, 95%, 96%, 97%, 98%, 99%, 99.5%, 99.6%, 99.7%, 99.8%, 99.9%, or 100% sequence identity to the sequence of SEQ ID NO: 509;
[1923] (ii) the second polypeptide chain comprises a sequence having at least 30%, 35%, 40%, 45%, 50%, 55%, 60%, 65%, 70%, 75%, 80%, 85%, 90%, 95%, 96%, 97%, 98%, 99%, 99.5%, 99.6%, 99.7%, 99.8%, 99.9%, or 100% sequence identity to the sequence of SEQ ID NO: 513; and
[1924] (iii) the third polypeptide chain comprises a sequence having at least 30%, 35%, 40%, 45%, 50%, 55%, 60%, 65%, 70%, 75%, 80%, 85%, 90%, 95%, 96%, 97%, 98%, 99%, 99.5%, 99.6%, 99.7%, 99.8%, 99.9%, or 100% sequence identity to the sequence of SEQ ID NO: 510.

[1925] In some embodiments, the multifunctional molecule consists of a first polypeptide chain, a second polypeptide chain, and a third polypeptide chain, wherein:
[1926] (i) the first polypeptide chain comprises the sequence of SEQ ID NO: 509.
[1927] (ii) the second polypeptide chain comprises the sequence of SEQ ID NO: 513; and
[1928] (iii) the third polypeptide chain comprises the sequence of SEQ ID NO: 510.

[1929] In some embodiments, the multifunctional molecule consists of a first polypeptide chain, a second polypeptide chain, and a third polypeptide chain, wherein:
[1930] (i) the first polypeptide chain comprises a sequence having at least 30%, 35%, 40%, 45%, 50%, 55%, 60%, 65%, 70%, 75%, 80%, 85%, 90%, 95%, 96%, 97%, 98%, 99%, 99.5%, 99.6%, 99.7%, 99.8%, 99.9%, or 100% sequence identity to the sequence of SEQ ID NO: 512;
[1931] (ii) the second polypeptide chain comprises a sequence having at least 30%, 35%, 40%, 45%, 50%, 55%, 60%, 65%, 70%, 75%, 80%, 85%, 90%, 95%, 96%, 97%, 98%, 99%, 99.5%, 99.6%, 99.7%, 99.8%, 99.9%, or 100% sequence identity to the sequence of SEQ ID NO: 510; and
[1932] (iii) the third polypeptide chain comprises a sequence having at least 30%, 35%, 40%, 45%, 50%, 55%, 60%, 65%, 70%, 75%, 80%, 85%, 90%, 95%, 96%, 97%, 98%, 99%, 99.5%, 99.6%, 99.7%, 99.8%, 99.9%, or 100% sequence identity to the sequence of SEQ ID NO: 513.

[1933] In some embodiments, the multifunctional molecule consists of a first polypeptide chain, a second polypeptide chain, and a third polypeptide chain, wherein:
[1934] (i) the first polypeptide chain comprises the sequence of SEQ ID NO: 512;
[1935] (ii) the second polypeptide chain comprises the sequence of SEQ ID NO: 513; and
[1936] (iii) the third polypeptide chain comprises the sequence of SEQ ID NO: 510.

[1937] In some embodiments, the multifunctional molecule consists of a first polypeptide chain, a second polypeptide chain, a third polypeptide chain, and a fourth polypeptide chain wherein:
[1938] (i) the first polypeptide chain comprises a sequence having at least 30%, 35%, 40%, 45%, 50%, 55%, 60%, 65%, 70%, 75%, 80%, 85%, 90%, 95%, 96%, 97%, 98%, 99%, 99.5%, 99.6%, 99.7%, 99.8%, 99.9%, or 100% sequence identity to the sequence of SEQ ID NO: 514;
[1939] (ii) the second polypeptide chain comprises a sequence having at least 30%, 35%, 40%, 45%, 50%, 55%, 60%, 65%, 70%, 75%, 80%, 85%, 90%, 95%, 96%, 97%, 98%, 99%, 99.5%, 99.6%, 99.7%, 99.8%, 99.9%, or 100% sequence identity to the sequence of SEQ ID NO: 514;
[1940] (iii) the third polypeptide chain comprises a sequence having at least 30%, 35%, 40%, 45%, 50%, 55%, 60%, 65%, 70%, 75%, 80%, 85%, 90%, 95%, 96%, 97%, 98%, 99%, 99.5%, 99.6%, 99.7%, 99.8%, 99.9%, or 100% sequence identity to the sequence of SEQ ID NO: 510; and
[1941] (iv) the fourth polypeptide chain comprises a sequence having at least 30%, 35%, 40%, 45%, 50%, 55%, 60%, 65%, 70%, 75%, 80%, 85%, 90%, 95%, 96%, 97%, 98%, 99%, 99.5%, 99.6%, 99.7%, 99.8%, 99.9%, or 100% sequence identity to the sequence of SEQ ID NO: 510.

[1942] In some embodiments, the multifunctional molecule consists of a first polypeptide chain, a second polypeptide chain, a third polypeptide chain, and a fourth polypeptide chain wherein.
[1943] (i) the first polypeptide chain comprises the sequence of SEQ ID NO: 514;
[1944] (ii) the second polypeptide chain comprises the sequence of SEQ ID NO: 514;
[1945] (iii) the third polypeptide chain comprises the sequence of SEQ ID NO: 510; and
[1946] (iv) the fourth polypeptide chain comprises the sequence of SEQ ID NO: 510.

[1947] In some embodiments, the multifunctional molecule consists of a first polypeptide chain, a second polypeptide chain, and a third polypeptide chain, wherein:
[1948] (i) the first polypeptide chain comprises a sequence having at least 30%, 35%, 40%, 45%, 50%, 55%, 60%, 65%, 70%, 75%, 80%, 85%, 90%, 95%, 96%, 97%, 98%, 99%, 99.5%, 99.6%, 99.7%, 99.8%, 99.9%, or 100% sequence identity to the sequence of SEQ ID NO: 519;
[1949] (ii) the second polypeptide chain comprises a sequence having at least 30%, 35%, 40%, 45%, 50%, 55%, 60%, 65%, 70%, 75%, 80%, 85%, 90%, 95%, 96%, 97%, 98%, 99%, 99.5%, 99.6%, 99.7%, 99.8%, 99.9%, or 100% sequence identity to the sequence of SEQ ID NO: 513; and
[1950] (iii) the third polypeptide chain comprises a sequence having at least 30%, 35%, 40%, 45%, 50%, 55%, 60%, 65%, 70%, 75%, 80%, 85%, 90%, 95%, 96%, 97%, 98%, 99%, 99.5%, 99.6%, 99.7%, 99.8%, 99.9%, or 100% sequence identity to the sequence of SEQ ID NO: 520.

[1951] In some embodiments, the multifunctional molecule consists of a first polypeptide chain, a second polypeptide chain, and a third polypeptide chain, wherein:
[1952] (i) the first polypeptide chain comprises the sequence of SEQ ID NO: 519;
[1953] (ii) the second polypeptide chain comprises the sequence of SEQ ID NO: 520; and
[1954] (iii) the third polypeptide chain comprises the sequence of SEQ ID NO: 513.

[1955] In some embodiments, the multifunctional molecule consists of a first polypeptide chain, a second polypeptide chain, a third polypeptide chain, and a fourth polypeptide chain wherein:
[1956] (i) the first polypeptide chain comprises a sequence having at least 30%, 35%, 40%, 45%, 50%, 55%, 60%, 65%, 70%, 75%, 80%, 85%, 90%, 95%, 96%, 97%, 98%, 99%, 99.5%, 99.6%, 99.7%, 99.8%, 99.9%, or 100% sequence identity to the sequence of SEQ ID NO: 521;
[1957] (ii) the second polypeptide chain comprises a sequence having at least 30%, 35%, 40%, 45%, 50%, 55%, 60%, 65%, 70%, 75%, 80%, 85%, 90%, 95%, 96%, 97%, 98%, 99%, 99.5%, 99.6%, 99.7%, 99.8%, 99.9%, or 100% sequence identity to the sequence of SEQ ID NO: 521;
[1958] (iii) the third polypeptide chain comprises a sequence having at least 30%, 35%, 40%, 45%, 50%, 55%, 60%, 65%, 70%, 75%, 80%, 85%, 90%, 95%, 96%, 97%, 98%, 99%, 99.5%, 99.6%, 99.7%, 99.8%, 99.9%, or 100% sequence identity to the sequence of SEQ ID NO: 520; and
[1959] (iv) the fourth polypeptide chain comprises a sequence having at least 30%, 35%, 40%, 45%, 50%, 55%, 60%, 65%, 70%, 75%, 80%, 85%, 90%, 95%, 96%, 97%, 98%, 99%, 99.5%, 99.6%, 99.7%, 99.8%, 99.9%, or 100% sequence identity to the sequence of SEQ ID NO: 520.

[1960] In some embodiments, the multifunctional molecule consists of a first polypeptide chain, a second polypeptide chain, a third polypeptide chain, and a fourth polypeptide chain wherein:
[1961] (i) the first polypeptide chain comprises the sequence of SEQ ID NO: 521;
[1962] (ii) the second polypeptide chain comprises the sequence of SEQ ID NO: 521;
[1963] (iii) the third polypeptide chain comprises the sequence of SEQ ID NO: 520; and
[1964] (iv) the fourth polypeptide chain comprises the sequence of SEQ ID NO: 520.

[1965] In some embodiments, the multifunctional molecule consists of a first polypeptide chain, a second polypeptide chain, a third polypeptide chain, and a fourth polypeptide chain wherein:
[1966] (i) the first polypeptide chain comprises a sequence having at least 30%, 35%, 40%, 45%, 50%, 55%, 60%, 65%, 70%, 75%, 80%, 85%, 90%, 95%, 96%, 97%, 98%, 99%, 99.5%, 99.6%, 99.7%, 99.8%, 99.9%, or 100% sequence identity to the sequence of SEQ ID NO: 505;
[1967] (ii) the second polypeptide chain comprises a sequence having at least 30%, 35%, 40%, 45%, 50%, 55%, 60%, 65%, 70%, 75%, 80%, 85%, 90%, 95%, 96%, 97%, 98%, 99%, 99.5%, 99.6%, 99.7%, 99.8%, 99.9%, or 100% sequence identity to the sequence of SEQ ID NO: 506;
[1968] (iii) the third polypeptide chain comprises a sequence having at least 30%, 35%, 40%, 45%, 50%, 55%, 60%, 65%, 70%, 75%, 80%, 85%, 90%, 95%, 96%, 97%, 98%, 99%, 99.5%, 99.6%, 99.7%, 99.8%, 99.9%, or 100% sequence identity to the sequence of SEQ ID NO: 502; and
[1969] (iv) the fourth polypeptide chain comprises a sequence having at least 30%, 35%, 40%, 45%, 50%, 55%, 60%, 65%, 70%, 75%, 80%, 85%, 90%, 95%, 96%, 97%, 98%, 99%, 99.5%, 99.6%, 99.7%, 99.8%, 99.9%, or 100% sequence identity to the sequence of SEQ ID NO: 507.

[1970] In some embodiments, the multifunctional molecule consists of a first polypeptide chain, a second polypeptide chain, a third polypeptide chain, and a fourth polypeptide chain wherein:
[1971] (i) the first polypeptide chain comprises the sequence of SEQ ID NO: 505;
[1972] (ii) the second polypeptide chain comprises the sequence of SEQ ID NO: 506;
[1973] (iii) the third polypeptide chain comprises the sequence of SEQ ID NO: 502; and
[1974] (iv) the fourth polypeptide chain comprises the sequence of SEQ ID NO: 507.

[1975] In some embodiments, the multifunctional molecule consists of a first polypeptide chain, a second polypeptide chain, a third polypeptide chain, and a fourth polypeptide chain wherein:
[1976] (i) the first polypeptide chain comprises a sequence having at least 30%, 35%, 40%, 45%, 50%, 55%, 60%, 65%, 70%, 75%, 80%, 85%, 90%, 95%, 96%, 97%, 98%, 99%, 99.5%, 99.6%, 99.7%, 99.8%, 99.9%, or 100% sequence identity to the sequence of SEQ ID NO: 515;
[1977] (ii) the second polypeptide chain comprises a sequence having at least 30%, 35%, 40%, 45%, 50%, 55%, 60%, 65%, 70%, 75%, 80%, 85%, 90%, 95%, 96%, 97%, 98%, 99%, 99.5%, 99.6%, 99.7%, 99.8%, 99.9%, or 100% sequence identity to the sequence of SEQ ID NO: 517;
[1978] (iii) the third polypeptide chain comprises a sequence having at least 30%, 35%, 40%, 45%, 50%, 55%, 60%, 65%, 70%, 75%, 80%, 85%, 90%, 95%, 96%, 97%, 98%, 99%, 99.5%, 99.6%, 99.7%, 99.8%, 99.9%, or 100% sequence identity to the sequence of SEQ ID NO: 516; and
[1979] (iv) the fourth polypeptide chain comprises a sequence having at least 30%, 35%, 40%, 45%, 50%, 55%, 60%, 65%, 70%, 75%, 80%, 85%, 90%, 95%, 96%, 97%, 98%, 99%, 99.5%, 99.6%, 99.7%, 99.8%, 99.9%, or 100% sequence identity to the sequence of SEQ ID NO: 510.

[1980] In some embodiments, the multifunctional molecule consists of a first polypeptide chain, a second polypeptide chain, a third polypeptide chain, and a fourth polypeptide chain wherein:
[1981] (i) the first polypeptide chain comprises the sequence of SEQ ID NO: 515;
[1982] (ii) the second polypeptide chain comprises the sequence of SEQ ID NO: 517;
[1983] (iii) the third polypeptide chain comprises the sequence of SEQ ID NO: 516; and
[1984] (iv) the fourth polypeptide chain comprises the sequence of SEQ ID NO: 510.

[1985] In some embodiments, the multifunctional molecule consists of a first polypeptide chain, a second polypeptide chain, a third polypeptide chain, and a fourth polypeptide chain wherein:
[1986] (i) the first polypeptide chain comprises a sequence having at least 30%, 35%, 40%, 45%, 50%, 55%, 60%, 65%, 70%, 75%, 80%, 85%, 90%, 95%, 96%, 97%, 98%, 99%, 99.5%, 99.6%, 99.7%, 99.8%, 99.9%, or 100% sequence identity to the sequence of SEQ ID NO: 515;
[1987] (ii) the second polypeptide chain comprises a sequence having at least 30%, 35%, 40%, 45%, 50%, 55%, 60%, 65%, 70%, 75%, 80%, 85%, 90%, 95%, 96%, 97%, 98%, 99%, 99.5%, 99.6%, 99.7%, 99.8%, 99.9%, or 100% sequence identity to the sequence of SEQ ID NO: 518;
[1988] (iii) the third polypeptide chain comprises a sequence having at least 30%, 35%, 40%, 45%, 50%, 55%, 60%, 65%, 70%, 75%, 80%, 85%, 90%, 95%, 96%, 97%, 98%, 99%, 99.5%, 99.6%, 99.7%, 99.8%, 99.9%, or 100% sequence identity to the sequence of SEQ ID NO: 516; and
[1989] (iv) the fourth polypeptide chain comprises a sequence having at least 30%, 35%, 40%, 45%, 50%, 55%, 60%, 65%, 70%, 75%, 80%, 85%, 90%, 95%, 96%, 97%, 98%, 99%, 99.5%, 99.6%, 99.7%, 99.8%, 99.9%, or 100% sequence identity to the sequence of SEQ ID NO: 510.

[1990] In some embodiments, the multifunctional molecule consists of a first polypeptide chain, a second polypeptide chain, a third polypeptide chain, and a fourth polypeptide chain wherein:
[1991] (i) the first polypeptide chain comprises the sequence of SEQ ID NO: 515;
[1992] (ii) the second polypeptide chain comprises the sequence of SEQ ID NO: 518;
[1993] (iii) the third polypeptide chain comprises the sequence of SEQ ID NO: 516; and
[1994] (iv) the fourth polypeptide chain comprises the sequence of SEQ ID NO: 510.

[1995] In some embodiments, the multifunctional molecule consists of a first polypeptide chain, a second polypeptide chain, a third polypeptide chain, and a fourth polypeptide chain wherein:
[1996] (i) the first polypeptide chain comprises a sequence having at least 30%, 35%, 40%, 45%, 50%, 55%, 60%, 65%, 70%, 75%, 80%, 85%, 90%, 95%, 96%, 97%, 98%, 99%, 99.5%, 99.6%, 99.7%, 99.8%, 99.9%, or 100% sequence identity to the sequence of SEQ ID NO: 515;
[1997] (ii) the second polypeptide chain comprises a sequence having at least 30%, 35%, 40%, 45%, 50%, 55%, 60%, 65%, 70%, 75%, 80%, 85%, 90%, 95%, 96%, 97%, 98%, 99%, 99.5%, 99.6%, 99.7%, 99.8%, 99.9%, or 100% sequence identity to the sequence of SEQ ID NO: 522;
[1998] (iii) the third polypeptide chain comprises a sequence having at least 30%, 35%, 40%, 45%, 50%, 55%, 60%, 65%, 70%, 75%, 80%, 85%, 90%, 95%, 96%, 97%, 98%, 99%, 99.5%, 99.6%, 99.7%, 99.8%, 99.9%, or 100% sequence identity to the sequence of SEQ ID NO: 516; and
[1999] (iv) the fourth polypeptide chain comprises a sequence having at least 30%, 35%, 40%, 45%, 50%, 55%, 60%, 65%, 70%, 75%, 80%, 85%, 90%, 95%, 96%, 97%, 98%, 99%, 99.5%, 99.6%, 99.7%, 99.8%, 99.9%, or 100% sequence identity to the sequence of SEQ ID NO: 512.

[2000] In some embodiments, the multifunctional molecule consists of a first polypeptide chain, a second polypeptide chain, a third polypeptide chain, and a fourth polypeptide chain wherein:
[2001] (i) the first polypeptide chain comprises the sequence of SEQ ID NO: 515.
[2002] (ii) the second polypeptide chain comprises the sequence of SEQ ID NO: 522;
[2003] (iii) the third polypeptide chain comprises the sequence of SEQ ID NO: 516; and
[2004] (iv) the fourth polypeptide chain comprises the sequence of SEQ ID NO: 520.

[2005] In some embodiments, the multispecific (e.g., bi-, tri-, quad-specific) or multifunctional molecule comprises a T cell engager that binds to, e.g., activates a costimulatory molecule expressed by a T cell. In some embodiments, the T cell engager that binds to, e.g., activates, a costimulatory molecule expressed by a T cell is a cytokine, such as IL-2, IL-15, IL-15-sushi, or IL21. In some embodiments, the T cell engager that binds to, e.g., activates, a costimulatory molecule expressed by a T cell binds to, e.g., activates, CD3, TCRα, TCRγ, TCRζ, ICOS, CD28, CD27, HVEM, LIGHT, CD40, 4-1BB, OX40, DR3, GITR, CD30, TIM1, SLAM, CD2, or CD226. In some embodiments, the T cell engager that binds to, e.g., activates, a costimulatory molecule expressed by a T cell is a CD40 ligand (CD40L), a CD70 ligand; an scFv or antigen binding domain of an antibody molecule that binds to CD40, an scFv or antigen binding domain of an antibody molecule that binds to CD70; an scFv or antigen binding domain of an antibody molecule that binds to OX40; an OX40 ligand (OX40L); a 41BB ligand (41BBL); or an scFv or antigen binding domain of an antibody molecule that binds to a CD2.

[2006] In some embodiments, the multispecific (e.g., bi-, tri-, quad-specific) or multifunctional molecule comprises at least two T cell engagers, wherein one of the T cell engagers binds to, e.g., activates a costimulatory molecule expressed by a T cell, and one of the T cell engagers binds to, e.g., activates TCRB, e.g., a TCRβV region. For example, the multispecific (e.g., bi-, tri-, quad-specific) or multifunctional molecule can comprise at least two T cell engagers, wherein one of the T cell engagers is an scFv or antigen binding domain of an antibody molecule that binds to, e.g., activates TCRB, e.g., a TCRβV region; and wherein one of the T cell engagers is a cytokine, such as IL-2, IL-15, IL-15-sushi, or IL21, a CD40 ligand (CD40L), a CD70 ligand; an scFv or antigen binding domain of an antibody molecule that binds to CD40, an scFv or antigen binding domain of an antibody molecule that binds to CD70; an scFv or antigen binding domain of an antibody molecule that binds to OX40; an OX40 ligand (OX40L): a 41BB ligand (41BBL); or an scFv or antigen binding domain of an antibody molecule that binds to a CD2, that binds to, e.g., activates a costimulatory molecule expressed by a T cell.

[2007] In some embodiments, the TCRβV-binding moiety comprises a KD to a TCRβV that is less than 0.001 pM, 0.005 pM, 0.01 pM, 0.05 pM, 0.1 pM, 0.5 pM, 1 pM, 5 pM, 10 pM, 50 pM, 100 pM, 500 pM, 1 nM, 5 nM, 10 nM, 50 nM, 100 nM, 500 nM, 1 pM, 5 μM, or is less than 10 μM.

[2008] In some embodiments, the TCRβV-binding moiety comprises a KD to a TCRβV that is more than 0.001 pM, 0.005 pM, 0.01 pM, 0.05 pM, 0.1 pM, 0.5 pM, 1 pM, 5 pM, 10 pM, 50 pM, 100 pM, 500 pM, 1 nM, 5 nM, 10 nM, 50 nM, 100 nM, 500 nM, 1 μM, 5 μM, or more than 10 μM.

[2009] In some embodiments, the TCRβV-binding moiety comprises a KD to a TCRβV that is from 0.001 pM-10 μM, 0.005 pM-10 pM, 0.01 pM-10 pM, 0.05 pM-10 pM, 0.1 pM-10 μM. 0.5 pM-10 pM, 1 pM-10 AM, 5 pM-10 pM, 10 pM-10 μM. 50 pM-10 pM, 100 pM-10 pM, 500 pM-10 pM, 1 nM-10 μM. 5 nM-10 AM, 10 nM-10 AM, 50 nM-10 μM. 100 nM-10 μM, 500 nM-10 μM, IuM-10 μM, or from 5 pM-10 u.M.

[2010] In some embodiments, the TCRβV-binding moiety comprises a KD to a TCRβV that is from 0.001 pM-10 μM, 0.001 pM-5 μM. 0.001 pM-luM. 0.001 pM-500 nM, 0.001 pM-100 nM, 0.001 pM-50 nM, 0.001 pM-10 nM, 0.001 pM-5 nM, 0.001 pM-1 nM, 0.001 pM-500 pM, 0.001 pM-100 pM, 0.001 pM-50 pM, 0.001 pM-10 pM, 0.001 pM-5 pM, 0.001 pM-1 pM, 0.001 pM-0.5 pM, 0.001 pM-0.1 pM, 0.001 pM-0.05 pM, or from 0.001 pM-0.01 pM.

[2011] In some embodiments, the TCRβV-binding moiety comprises a KD to a TCRβV that is from 0.001 pM-0.005 pM, 0.005 pM-0.01 pM, 0.01 pM-0.05 pM, 0.05 pM-0.1 pM, 0.1 pM-0.5 pM, 0.5 pM-1 pM, 1 pM-5 pM, 5 pM-10 pM, 10 pM-50 pM, 50 pM-100 pM, 100 pM-500 pM, 500 pM-1 nM, 1 nM-5 nM, 5 nM-10 nM, 10 nM-50 nM, 50 nM-100 nM, 100 nM-500 nM, 500 nM-1 μM, IuM-SuM, or from 5 μM-10 μM.

[2012] In some embodiments, the TCRβV-binding moiety comprises a KD to a TCRβV that is from 0.001 pM-10 μM, 0.005 pM-5 μM, 0.01 pM-1000 M, 0.05 pM-500 nM, 0.1 pM-100 nM, 0.5 pM-50 nM, 1 pM-10 nM, 5 pM-5 nM, 10 pM-1 nM, or from 50 pM-500 pM.

[2013] In some embodiments, the TCRβV-binding moiety comprises a to a TCRβV that from 10 pM-10 μM, 50 pM-5 pM, 100 pM-1000 nM, 500 pM-100 nM, or from 1 nM-10 nM.

[2014] In another aspect, provided herein is the use of the multifunctional molecule as provided herein, the polynucleotide as provided herein, the vector as provided herein, the cell as provided herein, the pharmaceutical composition as provided herein, or any combination thereof for a method of treating a condition or disease in a subject in need thereof, wherein the method comprises administering to the subject a therapeutically effective amount of the multifunctional molecule as provided herein, the polynucleotide as provided herein, the vector as provided herein, the cell as provided herein, the pharmaceutical composition as provided herein, or any combination thereof, thereby treating the condition or disease in the subject.

[2015] In another aspect, provided herein is the use of the multifunctional molecule as provided herein, the polynucleotide as provided herein, the vector as provided herein, the cell as provided herein, the pharmaceutical composition as provided herein, or any combination thereof for treating a condition or disease in a subject in need thereof, wherein the use of the multifunctional molecule as provided herein, the polynucleotide as provided herein, the vector as provided herein, the cell as provided herein, the pharmaceutical composition as provided herein, or any combination thereof, or any combination thereof is formulated for administration to the subject in a therapeutically effective amount.

[2016] In some embodiments, the therapeutically effective amount is an amount sufficient to treat the condition or disease in the subject.

[2017] In another aspect, provided herein is the multifunctional molecule as provided herein, the polynucleotide as provided herein, the vector as provided herein, the cell as provided herein, the pharmaceutical composition as provided herein, or any combination thereof for use as a medicament.

[2018] In another aspect, provided herein is the multifunctional molecule as provided herein, the polynucleotide as provided herein, the vector as provided herein, the cell as provided herein, the pharmaceutical composition as provided herein, or any combination thereof for use in the manufacture of a medicament for treating a condition or disease in a subject in need thereof.

[2019] In some embodiments, the multifunctional molecule as provided herein, the polynucleotide as provided herein, the vector as provided herein, the cell as provided herein, the pharmaceutical composition as provided herein, or any combination thereof is formulated for administration to the subject in a therapeutically effective amount.

[2020] In some embodiments, the therapeutically effective amount is an amount sufficient to treat the condition or disease in the subject.

[2021] In another aspect, provided herein a composition comprising a first agent comprising a TCRβV-binding moiety as provided herein and at least one cytokine molecule or a functional fragment or functional variant thereof, and a second agent comprising a TCRβV-binding moiety as provided herein and a tumor-associated antigen binding moiety as provided herein. In some embodiments, the TCRβV-binding moiety in the first agent is same as the TCRβV-binding moiety in the second agent. In some embodiments, the TCRβV-binding moiety in the first agent is different from the TCRβV-binding moiety in the second agent. In some embodiments, the first agent and/or the second agent is a polypeptide molecule. In some embodiments, the first agent and/or the second agent is a multifunctional molecule. In some embodiments, the first agent and/or the second agent is a multispecific molecule.

[2022] In another aspect, provided herein a method of administering a first agent comprising a TCRβV-binding moiety as provided herein and at least one cytokine molecule or a functional fragment or functional variant thereof, and a second agent comprising a TCRβV-binding moiety as provided herein and a tumor-associated antigen binding moiety as provided herein to treat a disease or condition in a subject in need thereof. In some embodiments, the TCRβV-binding moiety in the first agent is same as the TCRβV-binding moiety in the second agent. In some embodiments, the TCRβV-binding moiety in the first agent is different from the TCRβV-binding moiety in the second agent. In some embodiments, the first agent is administered to the subject prior to the second agent. In some embodiments, the first agent is administered concurrently with the second agent to the subject. In some embodiments, the first agent is administered to the subject after the second agent (for example, see, FIG. 138 and FIG. 139).

The application's sequence listing, which the Patent Office published only in electronic form, follows.

SEQUENCE LISTING (3802 sequences)

SEQ ID NO: 1 - protein, 119 aa, synthetic construct
QVQLQQSGPELVKPGTSVKISCKASGYSFTTYYIHWVKQRPGQGLEWIGWFFPGSGNIKYNEKFKGKATLTADTSSSTAYMQLSSLTSEESAVYFCAGSYYSYDVLDYWGHGTTLTVSS

SEQ ID NO: 2 - protein, 107 aa, synthetic construct
DILMTQSQKFMSTSLGDRVSVSCKASQNVGINVVWHQQKPGQSPKALIYSSSHRYSGVPDRFTGSGSGTDFTLTINNVQSEDLAEYFCQQFKSYPLTFGAGTKLELK

SEQ ID NO: 3 - protein, 10 aa, synthetic construct
GYSFTTYYIH

SEQ ID NO: 4 - protein, 17 aa, synthetic construct
WFFPGSGNIKYNEKFKG

SEQ ID NO: 5 - protein, 10 aa, synthetic construct
SYYSYDVLDY

SEQ ID NO: 6 - protein, 11 aa, synthetic construct
KASQNVGINVV

SEQ ID NO: 7 - protein, 7 aa, synthetic construct
SSSHRYS

SEQ ID NO: 8 - protein, 9 aa, synthetic construct
QQFKSYPLT

SEQ ID NO: 9 - protein, 119 aa, synthetic construct
QVQLVQSGAEVKKPGSSVKVSCKASGYSFTTYYIHWVRQAPGQGLEWMGWFFPGSGNIKYNEKFKGRVTITADTSTSTAYMELSSLRSEDTAVYYCAGSYYSYDVLDYWGQGTTVTVSS

SEQ ID NO: 10 - protein, 107 aa, synthetic construct
DIQMTQSPSFLSASVGDRVTITCKASQNVGINVVWHQQKPGKAPKALIYSSSHRYSGVPSRFSGSGSGTEFTLTISSLQPEDFATYFCQQFKSYPLTFGQGTKLEIK

SEQ ID NO: 11 - protein, 107 aa, synthetic construct
DIQMTQSPSSLSASVGDRVTITCKASQNVGINVVWHQQKPGKVPKALIYSSSHRYSGVPSRFSGSGSGTDFTLTISSLQPEDVATYFCQQFKSYPLTFGQGTKLEIK

SEQ ID NO: 12 - DNA, 357 bp, synthetic construct
  source 1..357: mol_type = other DNA
caggtgcagctggttcagtctggcgccgaagtgaagaaacctggctcctccgtgaaggtgtcctgcaaggcttccggctactccttcaccacctactacatccactgggtccgacaggcccctggacaaggattggaatggatgggctggttcttccccggctccggcaacatcaagtacaacgagaagttcaagggccgcgtgaccatcaccgccgacacctctacctctaccgcctacatggaactgtccagcctgagatctgaggacaccgccgtgtactactgcgccggctcctactactcttacgacgtgctggattactggggccagggcaccacagtgacagtgtcctct

SEQ ID NO: 13 - DNA, 321 bp, synthetic construct
  source 1..321: mol_type = other DNA
gacatccagatgacccagtctccatccttcctgtccgcctctgtgggcgacagagtgaccatcacatgcaaggcctctcagaacgtgggcatcaacgtcgtgtggcaccagcagaagcctggcaaggctcctaaggctctgatctactcctccagccaccggtactctggcgtgccctctagattttccggctctggctctggcaccgagtttaccctgacaatctccagcctgcagcctgaggacttcgccacctacttttgccagcagttcaagagctaccctctgacctttggccagggcaccaagctggaaatcaag

SEQ ID NO: 14 - DNA, 321 bp, synthetic construct
  source 1..321: mol_type = other DNA
gacatccagatgacccagtctccatcctctctgtccgcctctgtgggcgacagagtgaccatcacatgcaaggcctctcagaacgtgggcatcaacgtcgtgtggcaccagcagaaacctggcaaggtgcccaaggctctgatctactcctccagccacagatactccggcgtgccctctagattctccggctctggctctggcaccgactttaccctgacaatctccagcctgcagcctgaggacgtggccacctacttttgccagcagttcaagagctaccctctgacctttggccagggcaccaagctggaaatcaag

SEQ ID NO: 15 - protein, 117 aa, synthetic construct
DVQLVESGGGLVQPGGSRKLSCAASGFTFSNFGMHWVRQAPDKGLEWVAYISSGSSTIYYADTLKGRFTISRDNPKNTLFLQMTSLRSEDTAMYYCARRGEGAMDYWGQGTSVTVSS

SEQ ID NO: 16 - protein, 106 aa, synthetic construct
ENVLTQSPAIMSASLGEKVTMSCRASSSVNYIYWYQQKSDASPKLWIYYTSNLAPGVPTRFSGSGSGNSYSLTISSMEGEDAATYYCQQFTSSPFTFGSGTKLEIK

SEQ ID NO: 17 - protein, 10 aa, synthetic construct
GFTFSNFGMH

SEQ ID NO: 18 - protein, 17 aa, synthetic construct
YISSGSSTIYYADTLKG

SEQ ID NO: 19 - protein, 8 aa, synthetic construct
RGEGAMDY

SEQ ID NO: 20 - protein, 10 aa, synthetic construct
RASSSVNYIY

SEQ ID NO: 21 - protein, 7 aa, synthetic construct
YTSNLAP

SEQ ID NO: 22 - protein, 9 aa, synthetic construct
QQFTSSPFT

SEQ ID NO: 23 - protein, 117 aa, synthetic construct
QVQLVESGGGVVQPGRSLRLSCAASGFTFSNFGMHWVRQAPGKGLEWVAYISSGSSTIYYADTLKGRFTISRDNSKNTLYLQMNSLRAEDTAVYYCARRGEGAMDYWGQGTTVTVSS

SEQ ID NO: 24 - protein, 117 aa, synthetic construct
EVQLVESGGGLVQPGGSLRLSCAASGFTFSNFGMHWVRQAPGKGLEWVSYISSGSSTIYYADTLKGRFTISRDNAKNSLYLQMNSLRAEDTAVYYCARRGEGAMDYWGQGTTVTVSS

SEQ ID NO: 25 - protein, 117 aa, synthetic construct
EVQLVESGGGLVQPGGSLRLSCAASGFTFSNFGMHWVRQAPGKGLEWVSYISSGSSTIYYADTLKGRFTISRDNSKNTLYLQMNSLRAEDTAVYYCARRGEGAMDYWGQGTTVTVSS

SEQ ID NO: 26 - protein, 106 aa, synthetic construct
DNQLTQSPSFLSASVGDRVTITCRASSSVNYIYWYQQKPGKAPKLLIYYTSNLAPGVPSRFSGSGSGNEYTLTISSLQPEDFATYYCQQFTSSPFTFGQGTKLEIK

SEQ ID NO: 27 - protein, 106 aa, synthetic construct
DNQLTQSPSSLSASVGDRVTITCRASSSVNYIYWYQQKPGKAPKLLIYYTSNLAPGVPSRFSGSGSGNDYTLTISSLQPEDFATYYCQQFTSSPFTFGQGTKLEIK

SEQ ID NO: 28 - protein, 106 aa, synthetic construct
ENVLTQSPATLSVSPGERATLSCRASSSVNYIYWYQQKPGQAPRLLIYYTSNLAPGIPARFSGSGSGNEYTLTISSLQSEDFAVYYCQQFTSSPFTFGQGTKLEIK

SEQ ID NO: 29 - protein, 105 aa, synthetic construct
QNVLTQPPSASGTPGQRVTISCRASSSVNYIYWYQQLPGTAPKLLIYYTSNLAPGVPDRFSGSGSGNSYSLAISGLRSEDEADYYCQQFTSSPFTFGTGTKVTVL

SEQ ID NO: 30 - protein, 105 aa, synthetic construct
SNELTQPPSVSVSPGQTARITCRASSSVNYIYWYQQKSGQAPVLVIYYTSNLAPGIPERFSGSGSGNMYTLTISGAQVEDEADYYCQQFTSSPFTFGTGTKVTVL

SEQ ID NO: 31 - DNA, 351 bp, synthetic construct
  source 1..351: mol_type = other DNA
gaggtgcagctggttgaatctggcggaggattggttcagcctggcggctctctgagactgtcttgtgccgcttctggcttcaccttctccaacttcggcatgcactgggtccgacaggcccctggaaaaggactggaatgggtgtcctacatctcctccggctcctccaccatctactacgctgacaccctgaagggcagattcaccatctctcgggacaacgccaagaactccctgtacctgcagatgaacagcctgagagccgaggacaccgccgtgtactactgtgctagaagaggcgagggcgccatggattattggggccagggaaccacagtgaccgtgtctagc

SEQ ID NO: 32 - DNA, 351 bp, synthetic construct
  source 1..351: mol_type = other DNA
gaggtgcagctggttgaatctggcggaggattggttcagcctggcggctctctgagactgtcttgtgccgcttctggcttcaccttctccaacttcggcatgcactgggtccgacaggcccctggaaaaggactggaatgggtgtcctacatctcctccggctcctccaccatctactacgctgacaccctgaagggcagattcaccatcagccgggacaactccaagaacaccctgtacctgcagatgaactccctgagagccgaggacaccgccgtgtactactgtgctagaagaggcgagggcgccatggattattggggccagggaaccacagtgaccgtgtctagc

SEQ ID NO: 33 - DNA, 351 bp, synthetic construct
  source 1..351: mol_type = other DNA
caggtgcagctggtggaatctggtggcggagttgtgcagcctggcagatccctgagactgtcttgtgccgcctctggcttcaccttctccaacttcggcatgcactgggtccgacaggcccctggaaaaggattggagtgggtcgcctacatctcctccggctcctccaccatctactacgctgacaccctgaagggcagattcaccatcagccgggacaactccaagaacaccctgtacctgcagatgaactccctgagagccgaggacaccgccgtgtactactgtgctagaagaggcgagggcgccatggattattggggccagggaaccacagtgaccgtgtctagc

SEQ ID NO: 34 - DNA, 318 bp, synthetic construct
  source 1..318: mol_type = other DNA
gataaccagctgacccagtctcctagcttcctgtctgcctctgtgggcgacagagtgacaattacctgccgggcctcctcctccgtgaactacatctactggtatcagcagaagcccggcaaggcccctaagctgctgatctactacacctccaatctggcccctggcgtgccctctagattttccggatctggctccggcaacgagtataccctgacaatctccagcctgcagcctgaggacttcgccacctactactgccagcagttcacctcctctccattcacctttggccagggcaccaagctggaaatcaaa

SEQ ID NO: 35 - DNA, 317 bp, synthetic construct
  source 1..317: mol_type = other DNA
ataaccagctgacccagtctccttccagcctgtctgcttctgtgggcgacagagtgacaattacctgccgggcctcctcctccgtgaactacatctactggtatcagcagaagcccggcaaggcccctaagctgctgatctactacacctccaatctggcccctggcgtgccctctagattttccggatctggctccggcaacgactataccctgacaatctccagcctgcagcctgaggacttcgccacctactactgccagcagttcacctcctctccattcacctttggccagggcaccaagctggaaatcaaa

SEQ ID NO: 36 - DNA, 318 bp, synthetic construct
  source 1..318: mol_type = other DNA
gagaatgtgctgacccagtctcctgccacactgtctgttagccctggcgagagagctaccctgagctgcagagcctcttcctccgtgaactacatctactggtatcagcagaagcccggccaggctcctagactgctgatctactacacctccaatctggcccctggcatccctgccagattttccggatctggctccggcaacgagtataccctgaccatctccagcctgcagtccgaggactttgctgtgtactattgccagcagttcacaagcagccctttcacctttggccagggcaccaagctggaaatcaaa

SEQ ID NO: 37 - DNA, 315 bp, synthetic construct
  source 1..315: mol_type = other DNA
cagaatgtgctgacccaacctccttccgcctctggcacacctggacagagagtgacaatctcctgccgggcctcctcctccgtgaactacatctactggtatcagcagctgcccggcaccgctcctaaactgctgatctactacacctccaatctggcccctggcgtgcccgatagattttccggatctggctccggcaactcctacagcctggctatctctggcctgagatctgaggacgaggccgactactactgccagcagttcacctcctctccattcacctttggcaccggcaccaaagtgacagttctt

SEQ ID NO: 38 - DNA, 315 bp, synthetic construct
  source 1..315: mol_type = other DNA
tctaatgagctgacccagcctccttccgtgtccgtgtctcctggacagaccgccagaattacctgccgggcctcctcctccgtgaactacatctactggtatcagcagaagtccggccaggctcctgtgctcgtgatctactacacctccaatctggcccctggcatccctgagagattctccggatctggctccggcaacatgtacaccctgaccatctctggcgcccaggtggaagatgaggccgactactactgccagcagttcacctcctctccattcacctttggcaccggcaccaaagtgacagttctt

SEQ ID NO: 39 - protein, 107 aa, synthetic construct [sequence omitted]

SEQ ID NO: 40 - protein, 326 aa, synthetic construct
ASTKGPSVFPLAPCSRSTSESTAALGCLVKDYFPEPVTVSWNSGALTSGVHTFPAVLQSSGLYSLSSVVTVPSSSLGTKTYTCNVDHKPSNTKVDKRVESKYGPPCPPCPAPEFLGGPSVFLFPPKPKDTLMISRTPEVTCVVVDVSQEDPEVQFNWYVDGVEVHNAKTKPREEQFNSTYRVVSVLTVLHQDWLNGKEYKCKVSNKGLPSSIEKTISKAKGQPREPQVYTLPPSQEEMTKNQVSLTCLVKGFYPSDIAVEWESNGQPENNYKTTPPVLDSDGSFFLYSRLTVDKSRWQEGNVFSCSVMHEALHNHYTQKSLSLSLG

SEQ ID NO: 41 - protein, 330 aa, synthetic construct
ASTKGPSVFPLAPSSKSTSGGTAALGCLVKDYFPEPVTVSWNSGALTSGVHTFPAVLQSSGLYSLSSVVTVPSSSLGTQTYICNVNHKPSNTKVDKRVEPKSCDKTHTCPPCPAPELLGGPSVFLFPPKPKDTLMISRTPEVTCVVVDVSHEDPEVKFNWYVDGVEVHNAKTKPREEQYNSTYRVVSVLTVLHQDWLNGKEYKCKVSNKALPAPIEKTISKAKGQPREPQVYTLPPSREEMTKNQVSLTCLVKGFYPSDIAVEWESNGQPENNYKTTPPVLDSDGSFFLYSKLTVDKSRWQQGNVFSCSVMHEALHNHYTQKSLSLSPGK

SEQ ID NO: 42 - protein, 330 aa, synthetic construct
ASTKGPSVFPLAPSSKSTSGGTAALGCLVKDYFPEPVTVSWNSGALTSGVHTFPAVLQSSGLYSLSSVVTVPSSSLGTQTYICNVNHKPSNTKVDKRVEPKSCDKTHTCPPCPAPELLGGPSVFLFPPKPKDTLMISRTPEVTCVVVDVSHEDPEVKFNWYVDGVEVHNAKTKPREEQYASTYRVVSVLTVLHQDWLNGKEYKCKVSNKALPAPIEKTISKAKGQPREPQVYTLPPSREEMTKNQVSLTCLVKGFYPSDIAVEWESNGQPENNYKTTPPVLDSDGSFFLYSKLTVDKSRWQQGNVFSCSVMHEALHNHYTQKSLSLSPGK

SEQ ID NO: 43 - DNA, 344 bp, Homo sapiens
  source 1..344: mol_type = genomic DNA
atgagcatcggcctcctgtgctgtgcagccttgtctctcctgtgggcaggtccagtgaatgctggtgtcactcagaccccaaaattccaggtcctgaagacaggacagagcatgacactgcagtgtgcccaggatatgaaccatgaatacatgtcctggtatcgacaagacccaggcatggggctgaggctgattcattactcagttggtgctggtatcactgaccaaggagaagtccccaatggctacaatgtctccagatcaaccacagaggatttcccgctcaggctgctgtcggctgctccctcccagacatctgtgtacttctgtgccagcagttactc

SEQ ID NO: 44 - protein, 114 aa, Homo sapiens
MSIGLLCCAALSLLWAGPVNAGVTQTPKFQVLKTGQSMTLQCAQDMNHEYMSWYRQDPGMGLRLIHYSVGAGITDQGEVPNGYNVSRSTTEDFPLRLLSAAPSQTSVYFCASSY

SEQ ID NO: 45 - protein, 5 aa, synthetic construct
TYYIH

SEQ ID NO: 46 - protein, 17 aa, synthetic construct
WFFPGSGNIKYNEKFKG

SEQ ID NO: 47 - protein, 10 aa, synthetic construct
SYYSYDVLDY

SEQ ID NO: 48 - protein, 7 aa, synthetic construct
GYSFTTY

SEQ ID NO: 49 - protein, 6 aa, synthetic construct
FPGSGN

SEQ ID NO: 50 - protein, 10 aa, synthetic construct
SYYSYDVLDY

SEQ ID NO: 51 - protein, 11 aa, synthetic construct
KASQNVGINVV

SEQ ID NO: 52 - protein, 7 aa, synthetic construct
SSSHRYS

SEQ ID NO: 53 - protein, 9 aa, synthetic construct
QQFKSYPLT

SEQ ID NO: 54 - protein, 11 aa, synthetic construct
KASQNVGINVV

SEQ ID NO: 55 - protein, 7 aa, synthetic construct
SSSHRYS

SEQ ID NO: 56 - protein, 9 aa, synthetic construct
QQFKSYPLT

SEQ ID NO: 57 - protein, 5 aa, synthetic construct
NFGMH

SEQ ID NO: 58 - protein, 17 aa, synthetic construct
YISSGSSTIYYADTLKG

SEQ ID NO: 59 - protein, 8 aa, synthetic construct
RGEGAMDY

SEQ ID NO: 60 - protein, 7 aa, synthetic construct
GFTFSNF

SEQ ID NO: 61 - protein, 6 aa, synthetic construct
SSGSST

SEQ ID NO: 62 - protein, 8 aa, synthetic construct
RGEGAMDY

SEQ ID NO: 63 - protein, 10 aa, synthetic construct
RASSSVNYIY

SEQ ID NO: 64 - protein, 7 aa, synthetic construct
YTSNLAP

SEQ ID NO: 65 - protein, 9 aa, synthetic construct
QQFTSSPFT

SEQ ID NO: 66 - protein, 10 aa, synthetic construct
RASSSVNYIY

SEQ ID NO: 67 - protein, 7 aa, synthetic construct
YTSNLAP

SEQ ID NO: 68 - protein, 9 aa, synthetic construct
QQFTSSPFT

SEQ ID NO: 69 - protein, 592 aa, synthetic construct
METDTLLLWVLLLWVPGSTGQVQLVQSGAEVKKPGSSVKVSCKASGYSFTTYYIHWVRQAPGQGLEWMGWFFPGSGNIKYNEKFKGRVTITADTSTSTAYMELSSLRSEDTAVYYCAGSYYSYDVLDYWGQGTTVTVSSGSASAPTLFPLVSCENSPSDTSSVAVGCLAQDFLPDSITFSWKYKNNSDISSTRGFPSVLRGGKYAATSQVLLPSKDVMQGTDEHVVCKVQHPNGNKEKNVPLPVIAELPPKVSVFVPPRDGFFGNPRKSKLICQATGFSPRQIQVSWLREGKQVGSGVTTDQVQAEAKESGPTTYKVTSTLTIKESDWLGQSMFTCRVDHRGLTFQQNASSMCVPDQDTAIRVFAIPPSFASIFLTKSTKLTCLVTDLTTYDSVTISWTRQNGEAVKTHTNISESHPNATFSAVGEASICEDDWNSGERFTCTVTHTDLASSLKQTISRPKGVALHRPDVYLLPPAREQLNLRESATITCLVTGFSPADVFVQWMQRGQPLSPEKYVTSAPMPEPQAPGRYFAHSILTVSEEEWNTGETYTCVVAHEALPNRVTERTVDKSTGKPTLYNVSLVMSDTAGTCY

SEQ ID NO: 70 - protein, 492 aa, synthetic construct
METDTLLLWVLLLWVPGSTGQVQLVQSGAEVKKPGSSVKVSCKASGYSFTTYYIHWVRQAPGQGLEWMGWFFPGSGNIKYNEKFKGRVTITADTSTSTAYMELSSLRSEDTAVYYCAGSYYSYDVLDYWGQGTTVTVSSASPTSPKVFPLSLCSTQPDGNVVIACLVQGFFPQEPLSVTWSESGQGVTARNFPPSQDASGDLYTTSSQLTLPATQCLAGKSVTCHVKHYTNPSQDVTVPCPVPSTPPTPSPSTPPTPSPSCCHPRLSLHRPALEDLLLGSEANLTCTLTGLRDASGVTFTWTPSSGKSAVQGPPERDLCGCYSVSSVLPGCAEPWNHGKTFTCTAAYPESKTPLTATLSKSGNTFRPEVHLLPPPSEELALNELVTLTCLARGFSPKDVLVRWLQGSQELPREKYLTWASRQEPSQGTTTFAVTSILRVAAEDWKKGDTFSCMVGHEALPLAFTQKTIDRLAGKPTHVNVSVVMAEVDGTCY

SEQ ID NO: 71 - protein, 479 aa, synthetic construct
METDTLLLWVLLLWVPGSTGQVQLVQSGAEVKKPGSSVKVSCKASGYSFTTYYIHWVRQAPGQGLEWMGWFFPGSGNIKYNEKFKGRVTITADTSTSTAYMELSSLRSEDTAVYYCAGSYYSYDVLDYWGQGTTVTVSSASPTSPKVFPLSLDSTPQDGNVVVACLVQGFFPQEPLSVTWSESGQNVTARNFPPSQDASGDLYTTSSQLTLPATQCPDGKSVTCHVKHYTNSSQDVTVPCRVPPPPPCCHPRLSLHRPALEDLLLGSEANLTCTLTGLRDASGATFTWTPSSGKSAVQGPPERDLCGCYSVSSVLPGCAQPWNHGETFTCTAAHPELKTPLTANITKSGNTFRPEVHLLPPPSEELALNELVTLTCLARGFSPKDVLVRWLQGSQELPREKYLTWASRQEPSQGTTTYAVTSILRVAAEDWKKGETFSCMVGHEALPLAFTQKTIDRMAGKPTHINVSVVMAEADGTCY

SEQ ID NO: 72 - protein, 234 aa, synthetic construct
METDTLLLWVLLLWVPGSTGDIQMTQSPSFLSASVGDRVTITCKASQNVGINVVWHQQKPGKAPKALIYSSSHRYSGVPSRFSGSGSGTEFTLTISSLQPEDFATYFCQQFKSYPLTFGQGTKLEIKRTVAAPSVFIFPPSDEQLKSGTASVVCLLNNFYPREAKVQWKVDNALQSGNSQESVTEQDSKDSTYSLSSTLTLSKADYEKHKVYACEVTHQGLSSPVTKSFNRGEC

SEQ ID NO: 73 - protein, 453 aa, synthetic construct
GSASAPTLFPLVSCENSPSDTSSVAVGCLAQDFLPDSITFSWKYKNNSDISSTRGFPSVLRGGKYAATSQVLLPSKDVMQGTDEHVVCKVQHPNGNKEKNVPLPVIAELPPKVSVFVPPRDGFFGNPRKSKLICQATGFSPRQIQVSWLREGKQVGSGVTTDQVQAEAKESGPTTYKVTSTLTIKESDWLGQSMFTCRVDHRGLTFQQNASSMCVPDQDTAIRVFAIPPSFASIFLTKSTKLTCLVTDLTTYDSVTISWTRQNGEAVKTHTNISESHPNATFSAVGEASICEDDWNSGERFTCTVTHTDLASSLKQTISRPKGVALHRPDVYLLPPAREQLNLRESATITCLVTGFSPADVFVQWMQRGQPLSPEKYVTSAPMPEPQAPGRYFAHSILTVSEEEWNTGETYTCVVAHEALPNRVTERTVDKSTGKPTLYNVSLVMSDTAGTCY

SEQ ID NO: 74 - protein, 353 aa, synthetic construct
ASPTSPKVFPLSLCSTQPDGNVVIACLVQGFFPQEPLSVTWSESGQGVTARNFPPSQDASGDLYTTSSQLTLPATQCLAGKSVTCHVKHYTNPSQDVTVPCPVPSTPPTPSPSTPPTPSPSCCHPRLSLHRPALEDLLLGSEANLTCTLTGLRDASGVTFTWTPSSGKSAVQGPPERDLCGCYSVSSVLPGCAEPWNHGKTFTCTAAYPESKTPLTATLSKSGNTFRPEVHLLPPPSEELALNELVTLTCLARGFSPKDVLVRWLQGSQELPREKYLTWASRQEPSQGTTTFAVTSILRVAAEDWKKGDTFSCMVGHEALPLAFTQKTIDRLAGKPTHVNVSVVMAEVDGTCY

SEQ ID NO: 75 - protein, 340 aa, synthetic construct
ASPTSPKVFPLSLDSTPQDGNVVVACLVQGFFPQEPLSVTWSESGQNVTARNFPPSQDASGDLYTTSSQLTLPATQCPDGKSVTCHVKHYTNSSQDVTVPCRVPPPPPCCHPRLSLHRPALEDLLLGSEANLTCTLTGLRDASGATFTWTPSSGKSAVQGPPERDLCGCYSVSSVLPGCAQPWNHGETFTCTAAHPELKTPLTANITKSGNTFRPEVHLLPPPSEELALNELVTLTCLARGFSPKDVLVRWLQGSQELPREKYLTWASRQEPSQGTTTYAVTSILRVAAEDWKKGETFSCMVGHEALPLAFTQKTIDRMAGKPTHINVSVVMAEADGTCY

SEQ ID NO: 76 - protein, 159 aa, synthetic construct
MKNHLLFWGVLAVFIKAVHVKAQEDERIVLVDNKCKCARITSRIIRSSEDPNEDIVERNIRIIVPLNNRENISDPTSPLRTRFVYHLSDLCKKCDPTEVELDNQIVTATQSNICDEDSATETCYTYDRNKCYTAVVPLVYGGETKMVETALTPDACYPD

SEQ ID NO: 77-79 - skipped (3 entries)

SEQ ID NO: 80 - protein, 246 aa, synthetic construct
QVQLVQSGAEVKKPGSSVKVSCKASGTDFKLTYIHWVRQAPGQGLEWMGRVSPGSGNTKYNEKFKGRVTITADTSTSTAYMELSSLRSEDTAVYYCAGSYYSYDVLDYWGQGTTVTVSSGGGGSGGGGSGGGGSGGGGSDIQMTQSPSFLSASVGDRVTITCKASQNVEDRVAWYQQKPGKAPKALIYSSSHRYKGVPSRFSGSGSGTEFTLTISSLQPEDFATYFCQQFKSYPLTFGQGTKLEIK

SEQ ID NO: 81 - protein, 107 aa, synthetic construct
DIQMTQSPSFLSASVGDRVTITCKASQNVEDRVAWYQQKPGKAPKALIYSSSHRYKGVPSRFSGSGSGTEFTLTISSLQPEDFATYFCQQFKSYPLTFGQGTKLEIK

SEQ ID NO: 82 - protein, 119 aa, synthetic construct
QVQLVQSGAEVKKPGSSVKVSCKASGTDFKLTYIHWVRQAPGQGLEWMGRVSPGSGNTKYNEKFKGRVTITADTSTSTAYMELSSLRSEDTAVYYCAGSYYSYDVLDYWGQGTTVTVSS

SEQ ID NO: 83 - protein, 246 aa, synthetic construct
QVQLVQSGAEVKKPGSSVKVSCKASGTDFDKIYIHWVRQAPGQGLEWMGRISAGSGNVKYNEKFKGRVTITADTSTSTAYMELSSLRSEDTAVYYCAGSYYSYDVLDYWGQGTTVTVSSGGGGSGGGGSGGGGSGGGGSDIQMTQSPSFLSASVGDRVTITCKASQNVEDRVAWYQQKPGKAPKALIYSSSHRYKGVPSRFSGSGSGTEFTLTISSLQPEDFATYFCQQFKSYPLTFGQGTKLEIK

SEQ ID NO: 84 - protein, 107 aa, synthetic construct; identical to SEQ ID NO: 81

SEQ ID NO: 85 - protein, 119 aa, synthetic construct
QVQLVQSGAEVKKPGSSVKVSCKASGTDFDKIYIHWVRQAPGQGLEWMGRISAGSGNVKYNEKFKGRVTITADTSTSTAYMELSSLRSEDTAVYYCAGSYYSYDVLDYWGQGTTVTVSS

SEQ ID NO: 86 - protein, 246 aa, synthetic construct
QVQLVQSGAEVKKPGSSVKVSCKASGHDFRDFYIHWVRQAPGQGLEWMGRVYPGSGSYRYNEKFKGRVTITADTSTSTAYMELSSLRSEDTAVYYCAGSYYSYDVLDYWGQGTTVTVSSGGGGSGGGGSGGGGSGGGGSDIQMTQSPSFLSASVGDRVTITCKASQNVDDRVAWYQQKPGKAPKALIYSSSHRYKGVPSRFSGSGSGTEFTLTISSLQPEDFATYFCQQFKSYPLTFGQGTKLEIK

SEQ ID NO: 87 - protein, 107 aa, synthetic construct
DIQMTQSPSFLSASVGDRVTITCKASQNVDDRVAWYQQKPGKAPKALIYSSSHRYKGVPSRFSGSGSGTEFTLTISSLQPEDFATYFCQQFKSYPLTFGQGTKLEIK

SEQ ID NO: 88 - protein, 119 aa, synthetic construct
QVQLVQSGAEVKKPGSSVKVSCKASGHDFRDFYIHWVRQAPGQGLEWMGRVYPGSGSYRYNEKFKGRVTITADTSTSTAYMELSSLRSEDTAVYYCAGSYYSYDVLDYWGQGTTVTVSS

SEQ ID NO: 89 - protein, 246 aa, synthetic construct
QVQLVQSGAEVKKPGSSVKVSCKASGHDFKLTYIHWVRQAPGQGLEWMGRISAGSGNVKYNEKFKGRVTITADTSTSTAYMELSSLRSEDTAVYYCAGSYYSYDVLDYWGQGTTVTVSSGGGGSGGGGSGGGGSGGGGSDIQMTQSPSFLSASVGDRVTITCKASQNVDNRVAWYQQKPGKAPKALIYSSSHRYKGVPSRFSGSGSGTEFTLTISSLQPEDFATYFCQQFKSYPLTFGQGTKLEIK

SEQ ID NO: 90 - protein, 107 aa, synthetic construct
DIQMTQSPSFLSASVGDRVTITCKASQNVDNRVAWYQQKPGKAPKALIYSSSHRYKGVPSRFSGSGSGTEFTLTISSLQPEDFATYFCQQFKSYPLTFGQGTKLEIK

SEQ ID NO: 91 - protein, 119 aa, synthetic construct
QVQLVQSGAEVKKPGSSVKVSCKASGHDFKLTYIHWVRQAPGQGLEWMGRISAGSGNVKYNEKFKGRVTITADTSTSTAYMELSSLRSEDTAVYYCAGSYYSYDVLDYWGQGTTVTVSS

SEQ ID NO: 92 - protein, 246 aa, synthetic construct
QVQLVQSGAEVKKPGSSVKVSCKASGTDFKLTYIHWVRQAPGQGLEWMGRIFPGSGNVKYNEKFKGRVTITADTSTSTAYMELSSLRSEDTAVYYCAGSYYSYDVLDYWGQGTTVTVSSGGGGSGGGGSGGGGSGGGGSDIQMTQSPSFLSASVGDRVTITCKASQNVENKVAWHQQKPGKAPKALIYSSSHRYKGVPSRFSGSGSGTEFTLTISSLQPEDFATYFCQQFKSYPLTFGQGTKLEIK

SEQ ID NO: 93 - protein, 107 aa, synthetic construct
DIQMTQSPSFLSASVGDRVTITCKASQNVENKVAWHQQKPGKAPKALIYSSSHRYKGVPSRFSGSGSGTEFTLTISSLQPEDFATYFCQQFKSYPLTFGQGTKLEIK

SEQ ID NO: 94 - protein, 119 aa, synthetic construct
QVQLVQSGAEVKKPGSSVKVSCKASGTDFKLTYIHWVRQAPGQGLEWMGRIFPGSGNVKYNEKFKGRVTITADTSTSTAYMELSSLRSEDTAVYYCAGSYYSYDVLDYWGQGTTVTVSS

SEQ ID NO: 95 - protein, 246 aa, synthetic construct
QVQLVQSGAEVKKPGSSVKVSCKASGTDFDKIYIHWVRQAPGQGLEWMGRIFAGSGNTKYNEKFKGRVTITADTSTSTAYMELSSLRSEDTAVYYCAGSYYSYDVLDYWGQGTTVTVSSGGGGSGGGGSGGGGSGGGGSDIQMTQSPSFLSASVGDRVTITCKASQNVDDRVAWYQQKPGKAPKALIYSSSHRYKGVPSRFSGSGSGTEFTLTISSLQPEDFATYFCQQFKSYPLTFGQGTKLEIK

SEQ ID NO: 96 - protein, 107 aa, synthetic construct; identical to SEQ ID NO: 87

SEQ ID NO: 97 - protein, 119 aa, synthetic construct
QVQLVQSGAEVKKPGSSVKVSCKASGTDFDKIYIHWVRQAPGQGLEWMGRIFAGSGNTKYNEKFKGRVTITADTSTSTAYMELSSLRSEDTAVYYCAGSYYSYDVLDYWGQGTTVTVSS

SEQ ID NO: 98 - protein, 246 aa, synthetic construct
QVQLVQSGAEVKKPGSSVKVSCKASGHDFDKFYIHWVRQAPGQGLEWMGRVSAGSGNVKYNEKFKGRVTITADTSTSTAYMELSSLRSEDTAVYYCAGSYYSYDVLDYWGQGTTVTVSSGGGGSGGGGSGGGGSGGGGSDIQMTQSPSFLSASVGDRVTITCKASQNVGNRVAWYQQKPGKAPKALIYSSSHRYSGVPSRFSGSGSGTEFTLTISSLQPEDFATYFCQQFKSYPLTFGQGTKLEIK

SEQ ID NO: 99 - protein, 107 aa, synthetic construct
DIQMTQSPSFLSASVGDRVTITCKASQNVGNRVAWYQQKPGKAPKALIYSSSHRYSGVPSRFSGSGSGTEFTLTISSLQPEDFATYFCQQFKSYPLTFGQGTKLEIK

SEQ ID NO: 100 - protein, 119 aa, synthetic construct
QVQLVQSGAEVKKPGSSVKVSCKASGHDFDKFYIHWVRQAPGQGLEWMGRVSAGSGNVKYNEKFKGRVTITADTSTSTAYMELSSLRSEDTAVYYCAGSYYSYDVLDYWGQGTTVTVSS

SEQ ID NO: 101 - protein, 247 aa, synthetic construct
QVQLVQSGAEVKKPGSSVKVSCKASGHDFDKFYIHWVRQAPGQGLEWMGRIFAGSGNVKYNEKFKGRVTITADTSTSTAYMELSSLRSEDTAVYYCAGSYYSYDVLDYWGQGTTVTVSSGGGGSGGGGSGGGGSGGGGSDIQMTQSPSFLSASVGDRVTITCKASQNVGDRVAWYQQKPGKAPKALIYSSSHRYKGVPSRFSGSGSGTEFTLTISSLQPEDFATYFCQQFKSYPLTFGQGTKLEIKS

SEQ ID NO: 102 - protein, 107 aa, synthetic construct
DIQMTQSPSFLSASVGDRVTITCKASQNVGDRVAWYQQKPGKAPKALIYSSSHRYKGVPSRFSGSGSGTEFTLTISSLQPEDFATYFCQQFKSYPLTFGQGTKLEIK

SEQ ID NO: 103 - protein, 119 aa, synthetic construct
QVQLVQSGAEVKKPGSSVKVSCKASGHDFDKFYIHWVRQAPGQGLEWMGRIFAGSGNVKYNEKFKGRVTITADTSTSTAYMELSSLRSEDTAVYYCAGSYYSYDVLDYWGQGTTVTVSS

SEQ ID NO: 104 - protein, 246 aa, synthetic construct
QVQLVQSGAEVKKPGSSVKVSCKASGTDFKLTYIHWVRQAPGQGLEWMGRVSPGSGNVKYNEKFKGRVTITADTSTSTAYMELSSLRSEDTAVYYCAGSYYSYDVLDYWGQGTTVTVSSGGGGSGGGGSGGGGSGGGGSDIQMTQSPSFLSASVGDRVTITCKASQNVGDRVAWYQQKPGKAPKALIYSSSHRYKGVPSRFSGSGSGTEFTLTISSLQPEDFATYFCQQFKSYPLTFGQGTKLEIK

SEQ ID NO: 105 - protein, 107 aa, synthetic construct; identical to SEQ ID NO: 102

SEQ ID NO: 106 - protein, 119 aa, synthetic construct
QVQLVQSGAEVKKPGSSVKVSCKASGTDFKLTYIHWVRQAPGQGLEWMGRVSPGSGNVKYNEKFKGRVTITADTSTSTAYMELSSLRSEDTAVYYCAGSYYSYDVLDYWGQGTTVTVSS

SEQ ID NO: 107 - protein, 246 aa, synthetic construct
QVQLVQSGAEVKKPGSSVKVSCKASGTDFDKIYIHWVRQAPGQGLEWMGRVSAGSGNTKYNEKFKGRVTITADTSTSTAYMELSSLRSEDTAVYYCAGSYYSYDVLDYWGQGTTVTVSSGGGGSGGGGSGGGGSGGGGSDIQMTQSPSFLSASVGDRVTITCKASQNVGNRVAWYQQKPGKAPKALIYSSSHRYKGVPSRFSGSGSGTEFTLTISSLQPEDFATYFCQQFKSYPLTFGQGTKLEIK

SEQ ID NO: 108 - protein, 107 aa, synthetic construct
DIQMTQSPSFLSASVGDRVTITCKASQNVGNRVAWYQQKPGKAPKALIYSSSHRYKGVPSRFSGSGSGTEFTLTISSLQPEDFATYFCQQFKSYPLTFGQGTKLEIK

SEQ ID NO: 109 - protein, 119 aa, synthetic construct
QVQLVQSGAEVKKPGSSVKVSCKASGTDFDKIYIHWVRQAPGQGLEWMGRVSAGSGNTKYNEKFKGRVTITADTSTSTAYMELSSLRSEDTAVYYCAGSYYSYDVLDYWGQGTTVTVSS

SEQ ID NO: 110 - protein, 246 aa, synthetic construct
QVQLVQSGAEVKKPGSSVKVSCKASGTDFKLTYIHWVRQAPGQGLEWMGRIFPGSGNVKYNEKFKGRVTITADTSTSTAYMELSSLRSEDTAVYYCAGSYYSYDVLDYWGQGTTVTVSSGGGGSGGGGSGGGGSGGGGSDIQMTQSPSFLSASVGDRVTITCKASQNVDNRVAWYQQKPGKAPKALIYSSSHRYKGVPSRFSGSGSGTEFTLTISSLQPEDFATYFCQQFKSYPLTFGQGTKLEIK

SEQ ID NO: 111 - protein, 107 aa, synthetic construct; identical to SEQ ID NO: 90

SEQ ID NO: 112 - protein, 119 aa, synthetic construct; identical to SEQ ID NO: 94

SEQ ID NO: 113 - protein, 246 aa, synthetic construct
QVQLVQSGAEVKKPGSSVKVSCKASGTDFDKIYIHWVRQAPGQGLEWMGRISAGSGNTKYNEKFKGRVTITADTSTSTAYMELSSLRSEDTAVYYCAGSYYSYDVLDYWGQGTTVTVSSGGGGSGGGGSGGGGSGGGGSDIQMTQSPSFLSASVGDRVTITCKASQNVDDRVAWYQQKPGKAPKALIYSSSHRYKGVPSRFSGSGSGTEFTLTISSLQPEDFATYFCQQFKSYPLTFGQGTKLEIK

SEQ ID NO: 114 - protein, 107 aa, synthetic construct; identical to SEQ ID NO: 87

SEQ ID NO: 115 - protein, 119 aa, synthetic construct
QVQLVQSGAEVKKPGSSVKVSCKASGTDFDKIYIHWVRQAPGQGLEWMGRISAGSGNTKYNEKFKGRVTITADTSTSTAYMELSSLRSEDTAVYYCAGSYYSYDVLDYWGQGTTVTVSS

SEQ ID NO: 116 - protein, 246 aa, synthetic construct
QVQLVQSGAEVKKPGSSVKVSCKASGTDFRLTYIHWVRQAPGQGLEWMGRVSPGSGNTKYNEKFKGRVTITADTSTSTAYMELSSLRSEDTAVYYCAGSYYSYDVLDYWGQGTTVTVSSGGGGSGGGGSGGGGSGGGGSDIQMTQSPSFLSASVGDRVTITCKASQNVDNKVAWHQQKPGKAPKALIYSSSHRYKGVPSRFSGSGSGTEFTLTISSLQPEDFATYFCQQFKSYPLTFGQGTKLEIK

SEQ ID NO: 117 - protein, 107 aa, synthetic construct
DIQMTQSPSFLSASVGDRVTITCKASQNVDNKVAWHQQKPGKAPKALIYSSSHRYKGVPSRFSGSGSGTEFTLTISSLQPEDFATYFCQQFKSYPLTFGQGTKLEIK

SEQ ID NO: 118 - protein, 119 aa, synthetic construct
QVQLVQSGAEVKKPGSSVKVSCKASGTDFRLTYIHWVRQAPGQGLEWMGRVSPGSGNTKYNEKFKGRVTITADTSTSTAYMELSSLRSEDTAVYYCAGSYYSYDVLDYWGQGTTVTVSS

SEQ ID NO: 119 - protein, 246 aa, synthetic construct
QVQLVQSGAEVKKPGSSVKVSCKASGGTFRLTYIHWVRQAPGQGLEWMGRVYPGSGNTKYNEKFKGRVTITADTSTSTAYMELSSLRSEDTAVYYCAGSYYSYDVLDYWGQGTTVTVSSGGGGSGGGGSGGGGSGGGGSDIQMTQSPSFLSASVGDRVTITCKASQNVDDRVAWYQQKPGKAPKALIYSSSHRYKGVPSRFSGSGSGTEFTLTISSLQPEDFATYFCQQFKSYPLTFGQGTKLEIK

SEQ ID NO: 120 - protein, 107 aa, synthetic construct; identical to SEQ ID NO: 87

SEQ ID NO: 121 - protein, 119 aa, synthetic construct
QVQLVQSGAEVKKPGSSVKVSCKASGGTFRLTYIHWVRQAPGQGLEWMGRVYPGSGNTKYNEKFKGRVTITADTSTSTAYMELSSLRSEDTAVYYCAGSYYSYDVLDYWGQGTTVTVSS

SEQ ID NO: 122 - protein, 246 aa, synthetic construct
QVQLVQSGAEVKKPGSSVKVSCKASGTDFRLTYIHWVRQAPGQGLEWMGRIFPGSGNTKYNEKFKGRVTITADTSTSTAYMELSSLRSEDTAVYYCAGSYYSYDVLDYWGQGTTVTVSSGGGGSGGGGSGGGGSGGGGSDIQMTQSPSFLSASVGDRVTITCKASQNVDDRVAWYQQKPGKAPKALIYSSSHRYKGVPSRFSGSGSGTEFTLTISSLQPEDFATYFCQQFKSYPLTFGQGTKLEIK

SEQ ID NO: 123 - protein, 107 aa, synthetic construct; identical to SEQ ID NO: 87

SEQ ID NO: 124 - protein, 119 aa, synthetic construct
QVQLVQSGAEVKKPGSSVKVSCKASGTDFRLTYIHWVRQAPGQGLEWMGRIFPGSGNTKYNEKFKGRVTITADTSTSTAYMELSSLRSEDTAVYYCAGSYYSYDVLDYWGQGTTVTVSS

SEQ ID NO: 125 - protein, 246 aa, synthetic construct
QVQLVQSGAEVKKPGSSVKVSCKASGTDFKLTYIHWVRQAPGQGLEWMGRIFPGSGNVKYNEKFKGRVTITADTSTSTAYMELSSLRSEDTAVYYCAGSYYSYDVLDYWGQGTTVTVSSGGGGSGGGGSGGGGSGGGGSDIQMTQSPSFLSASVGDRVTITCKASQNVEDRVAWYQQKPGKAPKALIYSSSHRYKGVPSRFSGSGSGTEFTLTISSLQPEDFATYFCQQFKSYPLTFGQGTKLEIK

SEQ ID NO: 126 - protein, 107 aa, synthetic construct; identical to SEQ ID NO: 81

SEQ ID NO: 127 - protein, 119 aa, synthetic construct; identical to SEQ ID NO: 94

SEQ ID NO: 128 - protein, 246 aa, synthetic construct
QVQLVQSGAEVKKPGSSVKVSCKASGGTFRLTYIHWVRQAPGQGLEWMGRISAGSGNVKYNEKFKGRVTITADTSTSTAYMELSSLRSEDTAVYYCAGSYYSYDVLDYWGQGTTVTVSSGGGGSGGGGSGGGGSGGGGSDIQMTQSPSFLSASVGDRVTITCKASQNVGDRVAWYQQKPGKAPKALIYSSSHRYKGVPSRFSGSGSGTEFTLTISSLQPEDFATYFCQQFKSYPLTFGQGTKLEIK

SEQ ID NO: 129 - protein, 107 aa, synthetic construct; identical to SEQ ID NO: 102

SEQ ID NO: 130 - protein, 119 aa, synthetic construct
QVQLVQSGAEVKKPGSSVKVSCKASGGTFRLTYIHWVRQAPGQGLEWMGRISAGSGNVKYNEKFKGRVTITADTSTSTAYMELSSLRSEDTAVYYCAGSYYSYDVLDYWGQGTTVTVSS

SEQ ID NO: 131 - protein, 246 aa, synthetic construct
QVQLVQSGAEVKKPGSSVKVSCKASGGTFDKTYIHWVRQAPGQGLEWMGRISAGSGNTKYNEKFKGRVTITADTSTSTAYMELSSLRSEDTAVYYCAGSYYSYDVLDYWGQGTTVTVSSGGGGSGGGGSGGGGSGGGGSDIQMTQSPSFLSASVGDRVTITCKASQNVDDRVAWYQQKPGKAPKALIYSSSHRYKGVPSRFSGSGSGTEFTLTISSLQPEDFATYFCQQFKSYPLTFGQGTKLEIK

SEQ ID NO: 132 - protein, 107 aa, synthetic construct; identical to SEQ ID NO: 87

SEQ ID NO: 133 - protein, 119 aa, synthetic construct
QVQLVQSGAEVKKPGSSVKVSCKASGGTFDKTYIHWVRQAPGQGLEWMGRISAGSGNTKYNEKFKGRVTITADTSTSTAYMELSSLRSEDTAVYYCAGSYYSYDVLDYWGQGTTVTVSS

SEQ ID NO: 134 - protein, 246 aa, synthetic construct
QVQLVQSGAEVKKPGSSVKVSCKASGHDFDKFYIHWVRQAPGQGLEWMGRISAGSGNTKYNEKFKGRVTITADTSTSTAYMELSSLRSEDTAVYYCAGSYYSYDVLDYWGQGTTVTVSSGGGGSGGGGSGGGGSGGGGSDIQMTQSPSFLSASVGDRVTITCKASQNVDDRVAWYQQKPGKAPKALIYSSSHRYKGVPSRFSGSGSGTEFTLTISSLQPEDFATYFCQQFKSYPLTFGQGTKLEIK

SEQ ID NO: 135 - protein, 107 aa, synthetic construct; identical to SEQ ID NO: 87

SEQ ID NO: 136 - protein, 119 aa, synthetic construct
QVQLVQSGAEVKKPGSSVKVSCKASGHDFDKFYIHWVRQAPGQGLEWMGRISAGSGNTKYNEKFKGRVTITADTSTSTAYMELSSLRSEDTAVYYCAGSYYSYDVLDYWGQGTTVTVSS

SEQ ID NO: 137 - protein, 246 aa, synthetic construct
QVQLVQSGAEVKKPGSSVKVSCKASGTDFKLTYIHWVRQAPGQGLEWMGRISAGSGNVKYNEKFKGRVTITADTSTSTAYMELSSLRSEDTAVYYCAGSYYSYDVLDYWGQGTTVTVSSGGGGSGGGGSGGGGSGGGGSDIQMTQSPSFLSASVGDRVTITCKASQNVDNKVAWHQQKPGKAPKALIYSSSHRYKGVPSRFSGSGSGTEFTLTISSLQPEDFATYFCQQFKSYPLTFGQGTKLEIK

SEQ ID NO: 138 - protein, 107 aa, synthetic construct; identical to SEQ ID NO: 117

SEQ ID NO: 139 - protein, 119 aa, synthetic construct
QVQLVQSGAEVKKPGSSVKVSCKASGTDFKLTYIHWVRQAPGQGLEWMGRISAGSGNVKYNEKFKGRVTITADTSTSTAYMELSSLRSEDTAVYYCAGSYYSYDVLDYWGQGTTVTVSS

SEQ ID NO: 140 - protein, 246 aa, synthetic construct
QVQLVQSGAEVKKPGSSVKVSCKASGHDFRLTYIHWVRQAPGQGLEWMGRISAGSGNVKYNEKFKGRVTITADTSTSTAYMELSSLRSEDTAVYYCAGSYYSYDVLDYWGQGTTVTVSSGGGGSGGGGSGGGGSGGGGSDIQMTQSPSFLSASVGDRVTITCKASQNVADRVAWYQQKPGKAPKALIYSSSHRYKGVPSRFSGSGSGTEFTLTISSLQPEDFATYFCQQFKSYPLTFGQGTKLEIK

SEQ ID NO: 141 - protein, 107 aa, synthetic construct
DIQMTQSPSFLSASVGDRVTITCKASQNVADRVAWYQQKPGKAPKALIYSSSHRYKGVPSRFSGSGSGTEFTLTISSLQPEDFATYFCQQFKSYPLTFGQGTKLEIK

SEQ ID NO: 142 - protein, 119 aa, synthetic construct
QVQLVQSGAEVKKPGSSVKVSCKASGHDFRLTYIHWVRQAPGQGLEWMGRISAGSGNVKYNEKFKGRVTITADTSTSTAYMELSSLRSEDTAVYYCAGSYYSYDVLDYWGQGTTVTVSS

SEQ ID NO: 143 - protein, 246 aa, synthetic construct
QVQLVQSGAEVKKPGSSVKVSCKASGHDFHLWYIHWVRQAPGQGLEWMGRVSAGSGNVKYNEKFKGRVTITADTSTSTAYMELSSLRSEDTAVYYCAGSYYSYDVLDYWGQGTTVTVSSGGGGSGGGGSGGGGSGGGGSDIQMTQSPSFLSASVGDRVTITCKASQNVDNKVAWHQQKPGKAPKALIYSSSHRYKGVPSRFSGSGSGTEFTLTISSLQPEDFATYFCQQFKSYPLTFGQGTKLEIK

SEQ ID NO: 144 - protein, 107 aa, synthetic construct; identical to SEQ ID NO: 117

SEQ ID NO: 145 - protein, 119 aa, synthetic construct
QVQLVQSGAEVKKPGSSVKVSCKASGHDFHLWYIHWVRQAPGQGLEWMGRVSAGSGNVKYNEKFKGRVTITADTSTSTAYMELSSLRSEDTAVYYCAGSYYSYDVLDYWGQGTTVTVSS

SEQ ID NO: 146 - protein, 246 aa, synthetic construct
QVQLVQSGAEVKKPGSSVKVSCKASGHDFHLWYIHWVRQAPGQGLEWMGRVFAGSGNTKYNEKFKGRVTITADTSTSTAYMELSSLRSEDTAVYYCAGSYYSYDVLDYWGQGTTVTVSSGGGGSGGGGSGGGGSGGGGSDIQMTQSPSFLSASVGDRVTITCKASQNVEDKVAWYQQKPGKAPKALIYSSSHRYKGVPSRFSGSGSGTEFTLTISSLQPEDFATYFCQQFKSYPLTFGQGTKLEIK

SEQ ID NO: 147 - protein, 107 aa, synthetic construct
DIQMTQSPSFLSASVGDRVTITCKASQNVEDKVAWYQQKPGKAPKALIYSSSHRYKGVPSRFSGSGSGTEFTLTISSLQPEDFATYFCQQFKSYPLTFGQGTKLEIK

SEQ ID NO: 148 - protein, 119 aa, synthetic construct
QVQLVQSGAEVKKPGSSVKVSCKASGHDFHLWYIHWVRQAPGQGLEWMGRVFAGSGNTKYNEKFKGRVTITADTSTSTAYMELSSLRSEDTAVYYCAGSYYSYDVLDYWGQGTTVTVSS

SEQ ID NO: 149 - protein, 246 aa, synthetic construct
QVQLVQSGAEVKKPGSSVKVSCKASGTDFKLTYIHWVRQAPGQGLEWMGRIFPGSGNTKYNEKFKGRVTITADTSTSTAYMELSSLRSEDTAVYYCAGSYYSYDVLDYWGQGTTVTVSSGGGGSGGGGSGGGGSGGGGSDIQMTQSPSFLSASVGDRVTITCKASQNVDDRVAWYQQKPGKAPKALIYSSSHRYKGVPSRFSGSGSGTEFTLTISSLQPEDFATYFCQQFKSYPLTFGQGTKLEIK

SEQ ID NO: 150 - protein, 107 aa, synthetic construct; identical to SEQ ID NO: 87

SEQ ID NO: 151 - protein, 119 aa, synthetic construct
QVQLVQSGAEVKKPGSSVKVSCKASGTDFKLTYIHWVRQAPGQGLEWMGRIFPGSGNTKYNEKFKGRVTITADTSTSTAYMELSSLRSEDTAVYYCAGSYYSYDVLDYWGQGTTVTVSS

SEQ ID NO: 152 - skipped

SEQ ID NO: 153 - protein, 246 aa, synthetic construct
QVQLVQSGAEVKKPGSSVKVSCKASGTDFKLTYIHWVRQAPGQGLEWMGRVSAGSGNVKYNEKFKGRVTITADTSTSTAYMELSSLRSEDTAVYYCAGSYYSYDVLDYWGQGTTVTVSSGGGGSGGGGSGGGGSGGGGSDIQMTQSPSFLSASVGDRVTITCKASQNVGNRVAWYQQKPGKAPKALIYSSSHRYKGVPSRFSGSGSGTEFTLTISSLQPEDFATYFCQQFKSYPLTFGQGTKLEIK

SEQ ID NO: 154 - protein, 107 aa, synthetic construct; identical to SEQ ID NO: 108

SEQ ID NO: 155 - protein, 119 aa, synthetic construct
QVQLVQSGAEVKKPGSSVKVSCKASGTDFKLTYIHWVRQAPGQGLEWMGRVSAGSGNVKYNEKFKGRVTITADTSTSTAYMELSSLRSEDTAVYYCAGSYYSYDVLDYWGQGTTVTVSS

SEQ ID NO: 156 - protein, 246 aa, synthetic construct
QVQLVQSGAEVKKPGSSVKVSCKASGTDFKLTYIHWVRQAPGQGLEWMGRISPGSGNTKYNEKFKGRVTITADTSTSTAYMELSSLRSEDTAVYYCAGSYYSYDVLDYWGQGTTVTVSSGGGGSGGGGSGGGGSGGGGSDIQMTQSPSFLSASVGDRVTITCKASQNVGDRVAWYQQKPGKAPKALIYSSSHRYKGVPSRFSGSGSGTEFTLTISSLQPEDFATYFCQQFKSYPLTFGQGTKLEIK

SEQ ID NO: 157 - protein, 107 aa, synthetic construct; identical to SEQ ID NO: 102

SEQ ID NO: 158 - protein, 119 aa, synthetic construct
QVQLVQSGAEVKKPGSSVKVSCKASGTDFKLTYIHWVRQAPGQGLEWMGRISPGSGNTKYNEKFKGRVTITADTSTSTAYMELSSLRSEDTAVYYCAGSYYSYDVLDYWGQGTTVTVSS

SEQ ID NO: 159 - protein, 246 aa, synthetic construct
QVQLVQSGAEVKKPGSSVKVSCKASGHDFHLWYIHWVRQAPGQGLEWMGRISPGSGNVKYNEKFKGRVTITADTSTSTAYMELSSLRSEDTAVYYCAGSYYSYDVLDYWGQGTTVTVSSGGGGSGGGGSGGGGSGGGGSDIQMTQSPSFLSASVGDRVTITCKASQNVGDRVAWHQQKPGKAPKALIYSSSHRYKGVPSRFSGSGSGTEFTLTISSLQPEDFATYFCQQFKSYPLTFGQGTKLEIK

SEQ ID NO: 160 - protein, 107 aa, synthetic construct
DIQMTQSPSFLSASVGDRVTITCKASQNVGDRVAWHQQKPGKAPKALIYSSSHRYKGVPSRFSGSGSGTEFTLTISSLQPEDFATYFCQQFKSYPLTFGQGTKLEIK

SEQ ID NO: 161 - protein, 119 aa, synthetic construct
QVQLVQSGAEVKKPGSSVKVSCKASGHDFHLWYIHWVRQAPGQGLEWMGRISPGSGNVKYNEKFKGRVTITADTSTSTAYMELSSLRSEDTAVYYCAGSYYSYDVLDYWGQGTTVTVSS

SEQ ID NO: 162 - protein, 246 aa, synthetic construct
QVQLVQSGAEVKKPGSSVKVSCKASGHDFKLTYIHWVRQAPGQGLEWMGRISAGSGNVKYNEKFKGRVTITADTSTSTAYMELSSLRSEDTAVYYCAGSYYSYDVLDYWGQGTTVTVSSGGGGSGGGGSGGGGSGGGGSDIQMTQSPSFLSASVGDRVTITCKASQNVDDRVAWYQQKPGKAPKALIYSSSHRYKGVPSRFSGSGSGTEFTLTISSLQPEDFATYFCQQFKSYPLTFGQGTKLEIK

SEQ ID NO: 163 - protein, 107 aa, synthetic construct; identical to SEQ ID NO: 87

SEQ ID NO: 164 - protein, 119 aa, synthetic construct; identical to SEQ ID NO: 91

SEQ ID NO: 165 - protein, 246 aa, synthetic construct
QVQLVQSGAEVKKPGSSVKVSCKASGTDFHLWYIHWVRQAPGQGLEWMGRVFAGSGSYRYNEKFKGRVTITADTSTSTAYMELSSLRSEDTAVYYCAGSYYSYDVLDYWGQGTTVTVSSGGGGSGGGGSGGGGSGGGGSDIQMTQSPSFLSASVGDRVTITCKASQNVDDRVAWYQQKPGKAPKALIYSSSHRYKGVPSRFSGSGSGTEFTLTISSLQPEDFATYFCQQFKSYPLTFGQGTKLEIK

SEQ ID NO: 166 - protein, 107 aa, synthetic construct; identical to SEQ ID NO: 87

SEQ ID NO: 167 - protein, 119 aa, synthetic construct
QVQLVQSGAEVKKPGSSVKVSCKASGTDFHLWYIHWVRQAPGQGLEWMGRVFAGSGSYRYNEKFKGRVTITADTSTSTAYMELSSLRSEDTAVYYCAGSYYSYDVLDYWGQGTTVTVSS

SEQ ID NO: 168 - protein, 246 aa, synthetic construct
QVQLVQSGAEVKKPGSSVKVSCKASGTDFDKIYIHWVRQAPGQGLEWMGRISAGSGNTKYNEKFKGRVTITADTSTSTAYMELSSLRSEDTAVYYCAGSYYSYDVLDYWGQGTTVTVSSGGGGSGGGGSGGGGSGGGGSDIQMTQSPSFLSASVGDRVTITCKASQNVADRVAWYQQKPGKAPKALIYSSSHRYKGVPSRFSGSGSGTEFTLTISSLQPEDFATYFCQQFKSYPLTFGQGTKLEIK

SEQ ID NO: 169 - protein, 107 aa, synthetic construct; identical to SEQ ID NO: 141

SEQ ID NO: 170 - protein, 119 aa, synthetic construct; identical to SEQ ID NO: 115

SEQ ID NO: 171 - protein, 246 aa, synthetic construct
QVQLVQSGAEVKKPGSSVKVSCKASGTDFKLTYIHWVRQAPGQGLEWMGRISAGSGNTKYNEKFKGRVTITADTSTSTAYMELSSLRSEDTAVYYCAGSYYSYDVLDYWGQGTTVTVSSGGGGSGGGGSGGGGSGGGGSDIQMTQSPSFLSASVGDRVTITCKASQNVEDRVAWYQQKPGKAPKALIYSSSHRYKGVPSRFSGSGSGTEFTLTISSLQPEDFATYFCQQFKSYPLTFGQGTKLEIK

SEQ ID NO: 172 - protein, 107 aa, synthetic construct; identical to SEQ ID NO: 81

SEQ ID NO: 173 - protein, 119 aa, synthetic construct
QVQLVQSGAEVKKPGSSVKVSCKASGTDFKLTYIHWVRQAPGQGLEWMGRISAGSGNTKYNEKFKGRVTITADTSTSTAYMELSSLRSEDTAVYYCAGSYYSYDVLDYWGQGTTVTVSS

SEQ ID NO: 174 - protein, 246 aa, synthetic construct
QVQLVQSGAEVKKPGSSVKVSCKASGTDFRLTYIHWVRQAPGQGLEWMGRISPGSGNTKYNEKFKGRVTITADTSTSTAYMELSSLRSEDTAVYYCAGSYYSYDVLDYWGQGTTVTVSSGGGGSGGGGSGGGGSGGGGSDIQMTQSPSFLSASVGDRVTITCKASQNVGNRVAWYQQKPGKAPKALIYSSSHRYKGVPSRFSGSGSGTEFTLTISSLQPEDFATYFCQQFKSYPLTFGQGTKLEIK

SEQ ID NO: 175 - protein, 107 aa, synthetic construct; identical to SEQ ID NO: 108

SEQ ID NO: 176 - protein, 119 aa, synthetic construct
QVQLVQSGAEVKKPGSSVKVSCKASGTDFRLTYIHWVRQAPGQGLEWMGRISPGSGNTKYNEKFKGRVTITADTSTSTAYMELSSLRSEDTAVYYCAGSYYSYDVLDYWGQGTTVTVSS

SEQ ID NO: 177 - protein, 246 aa, synthetic construct
QVQLVQSGAEVKKPGSSVKVSCKASGHDFDKTYIHWVRQAPGQGLEWMGRVSAGSGNVKYNEKFKGRVTITADTSTSTAYMELSSLRSEDTAVYYCAGSYYSYDVLDYWGQGTTVTVSSGGGGSGGGGSGGGGSGGGGSDIQMTQSPSFLSASVGDRVTITCKASQNVEDRVAWYQQKPGKAPKALIYSSSHRYKGVPSRFSGSGSGTEFTLTISSLQPEDFATYFCQQFKSYPLTFGQGTKLEIK

SEQ ID NO: 178 - protein, 107 aa, synthetic construct; identical to SEQ ID NO: 81

SEQ ID NO: 179 - protein, 119 aa, synthetic construct
QVQLVQSGAEVKKPGSSVKVSCKASGHDFDKTYIHWVRQAPGQGLEWMGRVSAGSGNVKYNEKFKGRVTITADTSTSTAYMELSSLRSEDTAVYYCAGSYYSYDVLDYWGQGTTVTVSS

SEQ ID NO: 180 - protein, 246 aa, synthetic construct
QVQLVQSGAEVKKPGSSVKVSCKASGHDFKLTYIHWVRQAPGQGLEWMGRVSPGSGNTKYNEKFKGRVTITADTSTSTAYMELSSLRSEDTAVYYCAGSYYSYDVLDYWGQGTTVTVSSGGGGSGGGGSGGGGSGGGGSDIQMTQSPSFLSASVGDRVTITCKASQNVEDRVAWHQQKPGKAPKALIYSSSHRYKGVPSRFSGSGSGTEFTLTISSLQPEDFATYFCQQFKSYPLTFGQGTKLEIK

SEQ ID NO: 181 - protein, 107 aa, synthetic construct
DIQMTQSPSFLSASVGDRVTITCKASQNVEDRVAWHQQKPGKAPKALIYSSSHRYKGVPSRFSGSGSGTEFTLTISSLQPEDFATYFCQQFKSYPLTFGQGTKLEIK

SEQ ID NO: 182 - protein, 119 aa, synthetic construct
QVQLVQSGAEVKKPGSSVKVSCKASGHDFKLTYIHWVRQAPGQGLEWMGRVSPGSGNTKYNEKFKGRVTITADTSTSTAYMELSSLRSEDTAVYYCAGSYYSYDVLDYWGQGTTVTVSS

SEQ ID NO: 183 - protein, 246 aa, synthetic construct
QVQLVQSGAEVKKPGSSVKVSCKASGHDFDKTYIHWVRQAPGQGLEWMGRIYPGSGNVKYNEKFKGRVTITADTSTSTAYMELSSLRSEDTAVYYCAGSYYSYDVLDYWGQGTTVTVSSGGGGSGGGGSGGGGSGGGGSDIQMTQSPSFLSASVGDRVTITCKASQNVADRVAWYQQKPGKAPKALIYSSSHRYKGVPSRFSGSGSGTEFTLTISSLQPEDFATYFCQQFKSYPLTFGQGTKLEIK

SEQ ID NO: 184 - protein, 107 aa, synthetic construct; identical to SEQ ID NO: 141

SEQ ID NO: 185 - protein, 119 aa, synthetic construct
QVQLVQSGAEVKKPGSSVKVSCKASGHDFDKTYIHWVRQAPGQGLEWMGRIYPGSGNVKYNEKFKGRVTITADTSTSTAYMELSSLRSEDTAVYYCAGSYYSYDVLDYWGQGTTVTVSS

SEQ ID NO: 186 - protein, 246 aa, synthetic construct
QVQLVQSGAEVKKPGSSVKVSCKASGTDFDKTYIHWVRQAPGQGLEWMGRISAGSGNVKYNEKFKGRVTITADTSTSTAYMELSSLRSEDTAVYYCAGSYYSYDVLDYWGQGTTVTVSSGGGGSGGGGSGGGGSGGGGSDIQMTQSPSFLSASVGDRVTITCKASQNVDDRVAWYQQKPGKAPKALIYSSSHRYKGVPSRFSGSGSGTEFTLTISSLQPEDFATYFCQQFKSYPLTFGQGTKLEIK

SEQ ID NO: 187 - protein, 107 aa, synthetic construct; identical to SEQ ID NO: 87

SEQ ID NO: 188 - protein, 119 aa, synthetic construct
QVQLVQSGAEVKKPGSSVKVSCKASGTDFDKTYIHWVRQAPGQGLEWMGRISAGSGNVKYNEKFKGRVTITADTSTSTAYMELSSLRSEDTAVYYCAGSYYSYDVLDYWGQGTTVTVSS

SEQ ID NO: 189 - protein, 246 aa, synthetic construct
QVQLVQSGAEVKKPGSSVKVSCKASGTDFDKIYIHWVRQAPGQGLEWMGRISAGSGNIKYNEKFKGRVTITADTSTSTAYMELSSLRSEDTAVYYCAGSYYSYDVLDYWGQGTTVTVSSGGGGSGGGGSGGGGSGGGGSDIQMTQSPSFLSASVGDRVTITCKASQNVDDRVAWYQQKPGKAPKALIYSSSHRYKGVPSRFSGSGSGTEFTLTISSLQPEDFATYFCQQFKSYPLTFGQGTKLEIK

SEQ ID NO: 190 - protein, 107 aa, synthetic construct; identical to SEQ ID NO: 87

SEQ ID NO: 191 - protein, 119 aa, synthetic construct
QVQLVQSGAEVKKPGSSVKVSCKASGTDFDKIYIHWVRQAPGQGLEWMGRISAGSGNIKYNEKFKGRVTITADTSTSTAYMELSSLRSEDTAVYYCAGSYYSYDVLDYWGQGTTVTVSS

SEQ ID NO: 192 - protein, 246 aa, synthetic construct
QVQLVQSGAEVKKPGSSVKVSCKASGTDFDKIYIHWVRQAPGQGLEWMGRISAGSGNVKYNEKFKGRVTITADTSTSTAYMELSSLRSEDTAVYYCAGSYYSYDVLDYWGQGTTVTVSSGGGGSGGGGSGGGGSGGGGSDIQMTQSPSFLSASVGDRVTITCKASQNVGDRVAWYQQKPGKAPKALIYSSSHRYKGVPSRFSGSGSGTEFTLTISSLQPEDFATYFCQQFKSYPLTFGQGTKLEIK

SEQ ID NO: 193 - protein, 107 aa, synthetic construct; identical to SEQ ID NO: 102

SEQ ID NO: 194 - protein, 119 aa, synthetic construct; identical to SEQ ID NO: 85

SEQ ID NO: 195 - protein, 246 aa, synthetic construct
QVQLVQSGAEVKKPGSSVKVSCKASGGTFKLTYIHWVRQAPGQGLEWMGRVSAGSGNVKYNEKFKGRVTITADTSTSTAYMELSSLRSEDTAVYYCAGSYYSYDVLDYWGQGTTVTVSSGGGGSGGGGSGGGGSGGGGSDIQMTQSPSFLSASVGDRVTITCKASQNVDDRVAWYQQKPGKAPKALIYSSSHRYKGVPSRFSGSGSGTEFTLTISSLQPEDFATYFCQQFKSYPLTFGQGTKLEIK

SEQ ID NO: 196 - protein, 107 aa, synthetic construct; identical to SEQ ID NO: 87

SEQ ID NO: 197 - protein, 119 aa, synthetic construct
QVQLVQSGAEVKKPGSSVKVSCKASGGTFKLTYIHWVRQAPGQGLEWMGRVSAGSGNVKYNEKFKGRVTITADTSTSTAYMELSSLRSEDTAVYYCAGSYYSYDVLDYWGQGTTVTVSS

SEQ ID NO: 198 - protein, 246 aa, synthetic construct
QVQLVQSGAEVKKPGSSVKVSCKASGTDFKLTYIHWVRQAPGQGLEWMGRISPGSGNVKYNEKFKGRVTITADTSTSTAYMELSSLRSEDTAVYYCAGSYYSYDVLDYWGQGTTVTVSSGGGGSGGGGSGGGGSGGGGSDIQMTQSPSFLSASVGDRVTITCKASQNVDNRVAWHQQKPGKAPKALIYSSSHRYKGVPSRFSGSGSGTEFTLTISSLQPEDFATYFCQQFKSYPLTFGQGTKLEIK

SEQ ID NO: 199 - protein, 107 aa, synthetic construct
DIQMTQSPSFLSASVGDRVTITCKASQNVDNRVAWHQQKPGKAPKALIYSSSHRYKGVPSRFSGSGSGTEFTLTISSLQPEDFATYFCQQFKSYPLTFGQGTKLEIK

SEQ ID NO: 200 - protein, 119 aa, synthetic construct
QVQLVQSGAEVKKPGSSVKVSCKASGTDFKLTYIHWVRQAPGQGLEWMGRISPGSGNVKYNEKFKGRVTITADTSTSTAYMELSSLRSEDTAVYYCAGSYYSYDVLDYWGQGTTVTVSS

SEQ ID NO: 201 - protein, 246 aa, synthetic construct
QVQLVQSGAEVKKPGSSVKVSCKASGHDFDKFYIHWVRQAPGQGLEWMGRVSAGSGNTKYNEKFKGRVTITADTSTSTAYMELSSLRSEDTAVYYCAGSYYSYDVLDYWGQGTTVTVSSGGGGSGGGGSGGGGSGGGGSDIQMTQSPSFLSASVGDRVTITCKASQNVDNRVAWYQQKPGKAPKALIYSSSHRYKGVPSRFSGSGSGTEFTLTISSLQPEDFATYFCQQFKSYPLTFGQGTKLEIK

SEQ ID NO: 202 - protein, 107 aa, synthetic construct; identical to SEQ ID NO: 90

SEQ ID NO: 203 - protein, 119 aa, synthetic construct
QVQLVQSGAEVKKPGSSVKVSCKASGHDFDKFYIHWVRQAPGQGLEWMGRVSAGSGNTKYNEKFKGRVTITADTSTSTAYMELSSLRSEDTAVYYCAGSYYSYDVLDYWGQGTTVTVSS

SEQ ID NO: 204 - protein, 246 aa, synthetic construct
QVQLVQSGAEVKKPGSSVKVSCKASGTDFDKFYIHWVRQAPGQGLEWMGRVSAGSGNVKYNEKFKGRVTITADTSTSTAYMELSSLRSEDTAVYYCAGSYYSYDVLDYWGQGTTVTVSSGGGGSGGGGSGGGGSGGGGSDIQMTQSPSFLSASVGDRVTITCKASQNVGDRVVWYQQKPGKAPKALIYSSSHRYKGVPSRFSGSGSGTEFTLTISSLQPEDFATYFCQQFKSYPLTFGQGTKLEIK

SEQ ID NO: 205 - protein, 119 aa, synthetic construct
QVQLVQSGAEVKKPGSSVKVSCKASGTDFDKFYIHWVRQAPGQGLEWMGRVSAGSGNVKYNEKFKGRVTITADTSTSTAYMELSSLRSEDTAVYYCAGSYYSYDVLDYWGQGTTVTVSS

SEQ ID NO: 206 - protein, 246 aa, synthetic construct
QVQLVQSGAEVKKPGSSVKVSCKASGYSFTTYYIHWVRQAPGQGLEWMGWFSAGSGNTKYNEKFKGRVTITADTSTSTAYMELSSLRSEDTAVYYCAVSYYSYDVLDYWGQGTTVTVSSGGGGSGGGGSGGGGSGGGGSDIQMTQSPSFLSASVGDRVTITCKASQNVGINVVWHQQKPGKAPKALIYSSSHRYSGVPSRFSGSGSGTEFTLTISSLQPEDFATYFCQQFKSYPLTFGQGTKLEIK

SEQ ID NO: 207 - protein, 119 aa, synthetic construct
QVQLVQSGAEVKKPGSSVKVSCKASGYSFTTYYIHWVRQAPGQGLEWMGWFSAGSGNTKYNEKFKGRVTITADTSTSTAYMELSSLRSEDTAVYYCAVSYYSYDVLDYWGQGTTVTVSS

SEQ ID NO: 208 - protein, 246 aa, synthetic construct
QVQLVQSGAEVKKPGSSVKVSCKASGYSFTTYYIHWVRQAPGQGLEWMGWFSAGSGNTKYNEKFKGRVTITADTSTSTAYMELSSLRSEDTAVYYCAGSYYSYDVLDYWGQGTTVTVSSGGGGSGGGGSGGGGSGGGGSDIQMTQSPSFLSASVGDRVTITCKASQNVGINVVWHQQKPGKAPKALIYSSSHRYSGVPSRFSGSGSGTEFTLTISSLQPEDFATYFCQQFKSYPLTFGQGTKLEIK

SEQ ID NO: 209 - protein, 119 aa, synthetic construct
QVQLVQSGAEVKKPGSSVKVSCKASGYSFTTYYIHWVRQAPGQGLEWMGWFSAGSGNTKYNEKFKGRVTITADTSTSTAYMELSSLRSEDTAVYYCAGSYYSYDVLDYWGQGTTVTVSS

SEQ ID NO: 210 - protein, 246 aa, synthetic construct
QVQLVQSGAEVKKPGSSVKVSCKASGYSFTTYYIHWVRQAPGQGLEWMGWFFPGSGNTKYNEKFKGRVTITADTSTSTAYMELSSLRSEDTAVYYCAGSYYSYDVLDYWGQGTTVTVSSGGGGSGGGGSGGGGSGGGGSDIQMTQSPSFLSASVGDRVTITCKASQNVGINVVWHQQKPGKAPKALIYSSSHRYSGVPSRFSGSGSGTEFTLTISSLQPEDFATYFCQQFKSYPLTFGQGTKLEIK

SEQ ID NO: 211 - protein, 119 aa, synthetic construct
QVQLVQSGAEVKKPGSSVKVSCKASGYSFTTYYIHWVRQAPGQGLEWMGWFFPGSGNTKYNEKFKGRVTITADTSTSTAYMELSSLRSEDTAVYYCAGSYYSYDVLDYWGQGTTVTVSS

SEQ ID NO: 212 - protein, 246 aa, synthetic construct
QVQLVQSGAEVKKPGSSVKVSCKASGYSFTTYYIHWVRQAPGQGLEWMGWFSPGSGNTKYNEKFKGRVTITADTSTSTAYMELSSLRSEDTAVYYCAVSYYSYDVLDYWGQGTTVTVSSGGGGSGGGGSGGGGSGGGGSDIQMTQSPSFLSASVGDRVTITCKASQNVGINVVWHQQKPGKAPKALIYSSSHRYSGVPSRFSGSGSGTEFTLTISSLQPEDFATYFCQQFKSYPLTFGQGTKLEIK

SEQ ID NO: 213 - protein, 119 aa, synthetic construct
QVQLVQSGAEVKKPGSSVKVSCKASGYSFTTYYIHWVRQAPGQGLEWMGWFSPGSGNTKYNEKFKGRVTITADTSTSTAYMELSSLRSEDTAVYYCAVSYYSYDVLDYWGQGTTVTVSS

SEQ ID NO: 214 - protein, 246 aa, synthetic construct
QVQLVQSGAEVKKPGSSVKVSCKASGYSFTTYYIHWVRQAPGQGLEWMGWFSPGSGNTKYNEKFKGRVTITADTSTSTAYMELSSLRSEDTAVYYCAGSYYSYDVLDYWGQGTTVTVSSGGGGSGGGGSGGGGSGGGGSDIQMTQSPSFLSASVGDRVTITCKASQNVGINVVWHQQKPGKAPKALIYSSSHRYSGVPSRFSGSGSGTEFTLTISSLQPEDFATYFCQQFKSYPLTFGQGTKLEIK

SEQ ID NO: 215 - protein, 119 aa, synthetic construct
QVQLVQSGAEVKKPGSSVKVSCKASGYSFTTYYIHWVRQAPGQGLEWMGWFSPGSGNTKYNEKFKGRVTITADTSTSTAYMELSSLRSEDTAVYYCAGSYYSYDVLDYWGQGTTVTVSS

SEQ ID NO: 216 - protein, 246 aa, synthetic construct
QVQLVQSGAEVKKPGSSVKVSCKASGYSFTTYYIHWVRQAPGQGLEWMGRIFPGSGNIKYNEKFKGRVTITADTSTSTAYMELSSLRSEDTAVYYCAGSYYSYDVLDYWGQGTTVTVSSGGGGSGGGGSGGGGSGGGGSDIQMTQSPSFLSASVGDRVTITCKASQNVGINVVWHQQKPGKAPKALIYSSSHRYSGVPSRFSGSGSGTEFTLTISSLQPEDFATYFCQQFKSYPLTFGQGTKLEIK

SEQ ID NO: 217 - protein, 119 aa, synthetic construct
QVQLVQSGAEVKKPGSSVKVSCKASGYSFTTYYIHWVRQAPGQGLEWMGRIFPGSGNIKYNEKFKGRVTITADTSTSTAYMELSSLRSEDTAVYYCAGSYYSYDVLDYWGQGTTVTVSS

SEQ ID NO: 218 - protein, 246 aa, synthetic construct
QVQLVQSGAEVKKPGSSVKVSCKASGYSFTTYYIHWVRQAPGQGLEWMGWFFPGSGNIKYNEKFKGRVTITADTSTSTAYMELSSLRSEDTAVYYCAGSIYSAGVLDYWGQGTTVTVSSGGGGSGGGGSGGGGSGGGGSDIQMTQSPSFLSASVGDRVTITCKASQNVGINVVWHQQKPGKAPKALIYSSSHRYSGVPSRFSGSGSGTEFTLTISSLQPEDFATYFCQQFKSYPLTFGQGTKLEIK

SEQ ID NO: 219 - protein, 119 aa, synthetic construct
QVQLVQSGAEVKKPGSSVKVSCKASGYSFTTYYIHWVRQAPGQGLEWMGWFFPGSGNIKYNEKFKGRVTITADTSTSTAYMELSSLRSEDTAVYYCAGSIYSAGVLDYWGQGTTVTVSS

SEQ ID NO: 220 - protein, 246 aa, synthetic construct
QVQLVQSGAEVKKPGSSVKVSCKASGYSFTLGYIHWVRQAPGQGLEWMGWFFPGSGNIKYNEKFKGRVTITADTSTSTAYMELSSLRSEDTAVYYCAGSYYSYDVLDYWGQGTTVTVSSGGGGSGGGGSGGGGSGGGGSDIQMTQSPSFLSASVGDRVTITCKASQNVGINVVWHQQKPGKAPKALIYSSSHRYSGVPSRFSGSGSGTEFTLTISSLQPEDFATYFCQQFKSYPLTFGQGTKLEIK

SEQ ID NO: 221 - protein, 119 aa, synthetic construct
QVQLVQSGAEVKKPGSSVKVSCKASGYSFTLGYIHWVRQAPGQGLEWMGWFFPGSGNIKYNEKFKGRVTITADTSTSTAYMELSSLRSEDTAVYYCAGSYYSYDVLDYWGQGTTVTVSS

SEQ ID NO: 222 - protein, 246 aa, synthetic construct
QVQLVQSGAEVKKPGSSVKVSCKASGYSFRLTYIHWVRQAPGQGLEWMGWFFPGSGNIKYNEKFKGRVTITADTSTSTAYMELSSLRSEDTAVYYCAGSYYSYDVLDYWGQGTTVTVSSGGGGSGGGGSGGGGSGGGGSDIQMTQSPSFLSASVGDRVTITCKASQNVGINVVWHQQKPGKAPKALIYSSSHRYSGVPSRFSGSGSGTEFTLTISSLQPEDFATYFCQQFKSYPLTFGQGTKLEIK

SEQ ID NO: 223 - protein, 119 aa, synthetic construct
QVQLVQSGAEVKKPGSSVKVSCKASGYSFRLTYIHWVRQAPGQGLEWMGWFFPGSGNIKYNEKFKGRVTITADTSTSTAYMELSSLRSEDTAVYYCAGSYYSYDVLDYWGQGTTVTVSS

SEQ ID NO: 224 - protein, 246 aa, synthetic construct
QVQLVQSGAEVKKPGSSVKVSCKASGYSFHNWYIHWVRQAPGQGLEWMGWFFPGSGNIKYNEKFKGRVTITADTSTSTAYMELSSLRSEDTAVYYCAGSYYSYDVLDYWGQGTTVTVSSGGGGSGGGGSGGGGSGGGGSDIQMTQSPSFLSASVGDRVTITCKASQNVGINVVWHQQKPGKAPKALIYSSSHRYSGVPSRFSGSGSGTEFTLTISSLQPEDFATYFCQQFKSYPLTFGQGTKLEIK

SEQ ID NO: 225 - protein, 119 aa, synthetic construct
QVQLVQSGAEVKKPGSSVKVSCKASGYSFHNWYIHWVRQAPGQGLEWMGWFFPGSGNIKYNEKFKGRVTITADTSTSTAYMELSSLRSEDTAVYYCAGSYYSYDVLDYWGQGTTVTVSS

SEQ ID NO: 226-229 - skipped (4 entries)

SEQ ID NO: 230 - protein, 107 aa, synthetic construct
  VARIANT 30: note = G, E, A or D
  VARIANT 32: note = R or K
  VARIANT 36: note = Y or H
  VARIANT 56: note = K or S
DIQMTQSPSFLSASVGDRVTITCKASQNVXBXVAWXQQKPGKAPKALIYSSSHRYXGVPSRFSGSGSGTEFTLTISSLQPEDFATYFCQQFKSYPLTFGQGTKLEIK

SEQ ID NO: 231 - protein, 119 aa, synthetic construct
  VARIANT 27: note = H, T, G or Y
  VARIANT 28: note = D, T or S
  VARIANT 30: note = H, R, D, K or T
  VARIANT 31: note = L, D, K, T or N
  VARIANT 32: note = W, F, T, I, Y or G
  VARIANT 50: note = R or W
  VARIANT 51: note = V, I or F
  VARIANT 52: note = F, S or Y
  VARIANT 53: note = A or P
  VARIANT 57: note = N or S
  VARIANT 58: note = T, V, Y or I
  VARIANT 59: note = K or R
  VARIANT 98: note = G or V
  VARIANT 100: note = Y or I
  VARIANT 103: note = Y or A
  VARIANT 104: note = D or G
QVQLVQSGAEVKKPGSSVKVSCKASGXXFXXXYIHWVRQAPGQGLEWMGXXXXGSGXXXYNEKFKGRVTITADTSTSTAYMELSSLRSEDTAVYYCAXSXYSXXVLDYWGQGTTVTVSS

SEQ ID NO: 232 - protein, 107 aa, synthetic construct
DIQMTQTTSSLSASLGDRVTISCSASQGISNYLNWYQQKPDGTVKLLIYYTSSLHSGVPSRFSGSGSGTDYSLTISNLEPEDIATYYCQQYSKLPRTFGGGTKVEIK

SEQ ID NO: 233 - protein, 120 aa, synthetic construct
QVQLKESGPGLVAPSQSLSITCTVSGFSLTAYGVNWVRQPPGKGLEWLGMIWGDGNTDYNSALKSRLSISKDNSKSQVFLKMNSLQTDDTARYYCARDRVTATLYAMDYWGQGTSVTVSS

SEQ ID NO: 234-500 - skipped (267 entries)

SEQ ID NO: 501 - protein, 449 aa, synthetic construct
QVQLVQSGAEVKKPGSSVKVSCKASGYSFTGYTMNWVRQAPGQGLEWMGLITPYNGASSYNQKFRGRVTITVDKSTSTAYMELSSLRSEDTAVYYCARGGYDGRGFDYWGQGTLVTVSSASTKGPSVFPLAPSSKSTSGGTAALGCLVKDYFPEPVTVSWNSGALTSGVHTFPAVLQSSGLYSLSSVVTVPSSSLGTQTYICNVNHKPSNTKVDKRVEPKSCDKTHTCPPCPAPELLGGPSVFLFPPKPKDTLMISRTPEVTCVVVDVSHEDPEVKFNWYVDGVEVHNAKTKPREEQYASTYRVVSVLTVLHQDWLNGKEYKCKVSNKALPAPIEKTISKAKGQPREPQVCTLPPSREEMTKNQVSLSCAVKGFYPSDIAVEWESNGQPENNYKTTPPVLDSDGSFFLVSKLTVDKSRWQQGNVFSCSVMHEALHNHYTQKSLSLSPGK

SEQ ID NO: 502 - protein, 213 aa, synthetic construct
EIVLTQSPATLSLSPGERATLSCSASSSVSYMHWYQQKPGLAPRRLIYDTSKLASGIPDRFSGSGSGNDYTLTISRLEPEDFAVYYCQQWSKHPLTFGQGTKVEIKRTVAAPSVFIFPPSDEQLKSGTASVVCLLNNFYPREAKVQWKVDNALQSGNSQESVTEQDSKDSTYSLSSTLTLSKADYEKHKVYACEVTHQGLSSPVTKSFNRGEC

SEQ ID NO: 503 - protein, 488 aa, synthetic construct
QVQLVQSGAEVKKPGSSVKVSCKASGHDFRLTYIHWVRQAPGQGLEWMGRVSAGSGNVKYNEKFKGRVTITADTSTSTAYMELSSLRSEDTAVYYCAVSYYSYDVLDYWGQGTTVTVSSGGGGSGGGGSGGGGSGGGGSDIQMTQSPSFLSASVGDRVTITCKASQNVADRVVWHQQKPGKAPKALIYSSSHRYKGVPSRFSGSGSGTEFTLTISSLQPEDFATYFCQQFKSYPLTFGQGTKLEIKGGGGSGGGGSGGGGSDKTHTCPPCPAPELLGGPSVFLFPPKPKDTLMISRTPEVTCVVVDVSHEDPEVKFNWYVDGVEVHNAKTKPREEQYASTYRVVSVLTVLHQDWLNGKEYKCKVSNKALPAPIEKTISKAKGQPREPQVYTLPPCREEMTKNQVSLWCLVKGFYPSDIAVEWESNGQPENNYKTTPPVLDSDGSFFLYSKLTVDKSRWQQGNVFSCSVMHEALHNHYTQKSLSLSPGK

SEQ ID NO: 504 - protein, 700 aa, synthetic construct
QVQLVQSGAEVKKPGSSVKVSCKASGHDFRLTYIHWVRQAPGQGLEWMGRVSAGSGNVKYNEKFKGRVTITADTSTSTAYMELSSLRSEDTAVYYCAVSYYSYDVLDYWGQGTTVTVSSGGGGSGGGGSGGGGSGGGGSDIQMTQSPSFLSASVGDRVTITCKASQNVADRVVWHQQKPGKAPKALIYSSSHRYKGVPSRFSGSGSGTEFTLTISSLQPEDFATYFCQQFKSYPLTFGQGTKLEIKGGGGSQVQLVQSGAEVKKPGSSVKVSCKASGYSFTGYTMNWVRQAPGQGLEWMGLITPYNGASSYNQKFRGRVTITVDKSTSTAYMELSSLRSEDTAVYYCARGGYDGRGFDYWGQGTLVTVSSASTKGPSVFPLAPSSKSTSGGTAALGCLVKDYFPEPVTVSWNSGALTSGVHTFPAVLQSSGLYSLSSVVTVPSSSLGTQTYICNVNHKPSNTKVDKKVEPKSCDKTHTCPPCPAPELLGGPSVFLFPPKPKDTLMISRTPEVTCVVVDVSHEDPEVKFNWYVDGVEVHNAKTKPREEQYASTYRVVSVLTVLHQDWLNGKEYKCKVSNKALPAPIEKTISKAKGQPREPQVYTLPPSREEMTKNQVSLTCLVKGFYPSDIAVEWESNGQPENNYKTTPPVLDSDGSFFLYSKLTVDKSRWQQGNVFSCSVMHEALHNHYTQKSLSLSPGK

SEQ ID NO: 505 - protein, 449 aa, synthetic construct
QVQLVQSGAEVKKPGSSVKVSCKASGYSFTGYTMNWVRQAPGQGLEWMGLITPYNGASSYNQKFRGRVTITVDKSTSTAYMELSSLRSEDTAVYYCARGGYDGRGFDYWGQGTLVTVSSASTKGPSVFPLAPSSKSTSGGTAALGCLVKDYFPEPVTVSWNSGALTSGVHTFPAVLQSSGLYSLSSVVTVPSSSLGTQTYICNVNHKPSNTKVDKRVEPKSCDKTHTCPPCPAPELLGGPSVFLFPPKPKDTLMISRTPEVTCVVVDVSHEDPEVKFNWYVDGVEVHNAKTKPREEQYASTYRVVSVLTVLHQDWLNGKEYKCKVSNKALPAPIEKTISKAKGQPREPQVYTLPPSRDELTKNQVSLTCLVKGFYPSDIAVEWESNGQPENNYKTTPPVLDSDGSFFLYSRLTVDKSRWQQGNVFSCSVMHEALHNHYTQKSLSLSPGK

SEQ ID NO: 506 - protein, 455 aa, synthetic construct
EVKLVESGGGLVQPGGSLRLSCAASGFTFNTYAMNWVRQAPGKGLEWVARIRSKYNNYATYYADSVKDRFTISRDDSKSSLYLQMNNLKTEDTAMYYCVRHGNFGNSYVSWFAYWGQGTLVTVSSASTKGPSVFPLAPSSKSTSGGTAALGCLVKDYFPEPVTVSWNSGALTSGVHTFPAVLQSSGLYSLSSVVTVPSSSLGTQTYICNVNHKPSNTKVDKRVEPKSCDKTHTCPPCPAPELLGGPSVFLFPPKPKDTLMISRTPEVTCVVVDVSHEDPEVKFNWYVDGVEVHNAKTKPREEQYASTYRVVSVLTVLHQDWLNGKEYKCKVSNKALPAPIEKTISKAKGQPREPQVYTLPPSRDELTKNQVSLTCLVKGFYPSDIAVEWESNGQPENNYKTTPPVLDSDGSFLLYSKLTVDKSRWQQGNVFSCSVMHEALHNHYTQKSLSLSPGK

SEQ ID NO: 507 - protein, 215 aa, synthetic construct
QAVVTQEPSFSVSPGGTVTLTCRSSTGAVTTSNYANWVQQTPGQAFRGLIGGTNKRAPGVPARFSGSLIGDKAALTITGAQADDESIYFCALWYSNLWVFGGGTKLTVLGQPKANPTVTLFPPSSEELQANKATLVCLISDFYPGAVTVAWKADGSPVKAGVETTKPSKQSNNKYAASSYLSLTPEQWKSHRSYSCQVTHEGSTVEKTVAPTECS

SEQ ID NO: 508 - protein, 682 aa, synthetic construct
QVQLVQSGAEVKKPGSSVKVSCKASGYSFTGYTMNWVRQAPGQGLEWMGLITPYNGASSYNQKFRGRVTITVDKSTSTAYMELSSLRSEDTAVYYCARGGYDGRGFDYWGQGTLVTVSSASTKGPSVFPLAPSSKSTSGGTAALGCLVKDYFPEPVTVSWNSGALTSGVHTFPAVLQSSGLYSLSSVVTVPSSSLGTQTYICNVNHKPSNTKVDKKVEPKSCDGGGGSGGGGSQVQLVQSGAEVKKPGSSVKVSCKASGYSFTGYTMNWVRQAPGQGLEWMGLITPYNGASSYNQKFRGRVTITVDKSTSTAYMELSSLRSEDTAVYYCARGGYDGRGFDYWGQGTLVTVSSASTKGPSVFPLAPSSKSTSGGTAALGCLVKDYFPEPVTVSWNSGALTSGVHTFPAVLQSSGLYSLSSVVTVPSSSLGTQTYICNVNHKPSNTKVDKRVEPKSCDKTHTCPPCPAPELLGGPSVFLFPPKPKDTLMISRTPEVTCVVVDVSHEDPEVKFNWYVDGVEVHNAKTKPREEQYASTYRVVSVLTVLHQDWLNGKEYKCKVSNKALPAPIEKTISKAKGQPREPQVYTLPPSRDELTKNQVSLTCLVKGFYPSDIAVEWESNGQPENNYKTTPPVLDSDGSFFLYSRLTVDKSRWQQGNVFSCSVMHEALHNHYTQKSLSLSPGK

SEQ ID NO: 509 - protein, 449 aa, synthetic construct
QVQLVQSGAEVKKPGASVKVSCKASGYTFTGNYINWVRQAPGQGLEWMGIINPTKGWTLYAQKFQGRVTMTRDTSISTAYMELSSLRSEDTAVYYCARWHHGTWIFDYWGQGTLVTVSSASTKGPSVFPLAPSSKSTSGGTAALGCLVKDYFPEPVTVSWNSGALTSGVHTFPAVLQSSGLYSLSSVVTVPSSSLGTQTYICNVNHKPSNTKVDKRVEPKSCDKTHTCPPCPAPNAAGGPSVFIFPPKIKDVLMISLSPIVTCVVVDVSEDDPDVQISWFVNNVEVHTAQTQTHREDYNSTLRVVSALPIQHQDWMSGKEFKCKVNNKDLGAPIERTISKPKGSVRAPQVCVLPPPEEEMTKKQVTLSCAVTDFMPEDIYVEWTNNGKTELNYKNTEPVLDSDGSYFMVSKLRVEKKNWVERNSYSCSVVHEGLHNHHTTKSFSRTPGK

SEQ ID NO: 510 - protein, 215 aa, synthetic construct
DIVLTQPPSVSGAPGQRVTISCSGSSSNIGSNYVSWYQQLPGTAPKLLIYNDNQRPSGVPDRFSGSKSGTSASLAITGLQSEDEADYYCSTYDRRTFSVFGGGTKLTVLGQPKANPTVTLFPPSSEELQANKATLVCLISDFYPGAVTVAWKADGSPVKAGVETTKPSKQSNNKYAASSYLSLTPEQWKSHRSYSCQVTHEGSTVEKTVAPTECS

SEQ ID NO: 511 - protein, 637 aa, synthetic construct
QVQLQQSGTELMKPGASVKISCKASGYTFSNYWIEWIKQRPGHGLEWVGEILPGAGPTNYNEKFKGKATFTADSSSNTAYMQLSSLTSEDSAVYYCARTDYDYDWFAYWGQGTLVTVSAGGGGSGGGGSGGGGSGGGGSDIVMSQSPSSLAVSVGEKVTMSCKSSQSLLYSGNQKNYLAWYQQKPGQSPKLLIYWASTRESGVPDRFTGSGSGTDFTLTINSVKAEDLTVYYCQQYYGYPRTFGGGTKVEIKGGGGSGGGGSGGGGSAPTSSSTKKTQLQLEHLLLDLQMILNGINNYKNPKLTRMLTFKFYMPKKATELKHLQCLEEELKPLEEVLNLAQSKNFHLRPRDLISNINVIVLELKGSETTFMCEYADETATIVEFLNRWITFCQSIISTLTGGGGSGGGGSDKTHTCPPCPAPNAAGGPSVFIFPPKIKDVLMISLSPIVTCVVVDVSEDDPDVQISWFVNNVEVHTAQTQTHREDYNSTLRVVSALPIQHQDWMSGKEFKCKVNNKDLGAPIERTISKPKGSVRAPQVYVLPPCEEEMTKKQVTLWCMVTDFMPEDIYVEWTNNGKTELNYKNTEPVLDSDGSYFMYSKLRVEKKNWVERNSYSCSVVHEGLHNHHTTKSFSRTPGK

SEQ ID NO: 512 - protein, 682 aa, synthetic construct
QVQLVQSGAEVKKPGASVKVSCKASGYTFTGNYINWVRQAPGQGLEWMGIINPTKGWTLYAQKFQGRVTMTRDTSISTAYMELSSLRSEDTAVYYCARWHHGTWIFDYWGQGTLVTVSSASTKGPSVFPLAPSSKSTSGGTAALGCLVKDYFPEPVTVSWNSGALTSGVHTFPAVLQSSGLYSLSSVVTVPSSSLGTQTYICNVNHKPSNTKVDKRVEPKSCDGGGGSGGGGSQVQLVQSGAEVKKPGASVKVSCKASGYTFTGNYINWVRQAPGQGLEWMGIINPTKGWTLYAQKFQGRVTMTRDTSISTAYMELSSLRSEDTAVYYCARWHHGTWIFDYWGQGTLVTVSSASTKGPSVFPLAPSSKSTSGGTAALGCLVKDYFPEPVTVSWNSGALTSGVHTFPAVLQSSGLYSLSSVVTVPSSSLGTQTYICNVNHKPSNTKVDKRVEPKSCDKTHTCPPCPAPNAAGGPSVFIFPPKIKDVLMISLSPIVTCVVVDVSEDDPDVQISWFVNNVEVHTAQTQTHREDYNSTLRVVSALPIQHQDWMSGKEFKCKVNNKDLGAPIERTISKPKGSVRAPQVCVLPPPEEEMTKKQVTLSCAVTDFMPEDIYVEWTNNGKTELNYKNTEPVLDSDGSYFMVSKLRVEKKNWVERNSYSCSVVHEGLHNHHTTKSFSRTPGK

SEQ ID NO: 513 - protein, 484 aa, synthetic construct
QVQLQQSGTELMKPGASVKISCKASGYTFSNYWIEWIKQRPGHGLEWVGEILPGAGPTNYNEKFKGKATFTADSSSNTAYMQLSSLTSEDSAVYYCARTDYDYDWFAYWGQGTLVTVSAGGGGSGGGGSGGGGSGGGGSDIVMSQSPSSLAVSVGEKVTMSCKSSQSLLYSGNQKNYLAWYQQKPGQSPKLLIYWASTRESGVPDRFTGSGSGTDFTLTINSVKAEDLTVYYCQQYYGYPRTFGGGTKVEIKGGGGSDKTHTCPPCPAPNAAGGPSVFIFPPKIKDVLMISLSPIVTCVVVDVSEDDPDVQISWFVNNVEVHTAQTQTHREDYNSTLRVVSALPIQHQDWMSGKEFKCKVNNKDLGAPIERTISKPKGSVRAPQVYVLPPCEEEMTKKQVTLWCMVTDFMPEDIYVEWTNNGKTELNYKNTEPVLDSDGSYFMYSKLRVEKKNWVERNSYSCSVVHEGLHNHHTTKSFSRTPGK

SEQ ID NO: 514 - protein, 706 aa, synthetic construct
QVQLQQSGTELMKPGASVKISCKASGYTFSNYWIEWIKQRPGHGLEWVGEILPGAGPTNYNEKFKGKATFTADSSSNTAYMQLSSLTSEDSAVYYCARTDYDYDWFAYWGQGTLVTVSAGGGGSGGGGSGGGGSGGGGSDIVMSQSPSSLAVSVGEKVTMSCKSSQSLLYSGNQKNYLAWYQQKPGQSPKLLIYWASTRESGVPDRFTGSGSGTDFTLTINSVKAEDLTVYYCQQYYGYPRTFGGGTKVEIKGGGGSQVQLVQSGAEVKKPGASVKVSCKASGYTFTGNYINWVRQAPGQGLEWMGIINPTKGWTLYAQKFQGRVTMTRDTSISTAYMELSSLRSEDTAVYYCARWHHGTWIFDYWGQGTLVTVSSASTKGPSVFPLAPSSKSTSGGTAALGCLVKDYFPEPVTVSWNSGALTSGVHTFPAVLQSSGLYSLSSVVTVPSSSLGTQTYICNVNHKPSNTKVDKRVEPKSCDKTHTCPPCPAPNAAGGPSVFIFPPKIKDVLMISLSPIVTCVVVDVSEDDPDVQISWFVNNVEVHTAQTQTHREDYNSTLRVVSALPIQHQDWMSGKEFKCKVNNKDLGAPIERTISKPKGSVRAPQVYVLPPPEEEMTKKQVTLTCMVTDFMPEDIYVEWTNNGKTELNYKNTEPVLDSDGSYFMYSKLRVEKKNWVERNSYSCSVVHEGLHNHHTTKSFSRTPGK

SEQ ID NO: 515 - protein, 445 aa, synthetic construct
EVQLVESGGGLVQPGKSLKLSCEASGFTFSGYGMHWVRQAPGRGLESVAYITSSSINIKYADAVKGRFTVSRDNAKNLLFLQMNILKSEDTAMYYCARFDWDKNYWGQGTMVTVSSAKTTAPSVYPLAPVSGDTTGSSVTLGCLVKGYFPEPVTLTWNSGSLSSGVHTFPAVLQSDLYTLSSSVTVTSSTWPSQSITCNVAHPASSTKVDKKIEPKSCDKTHTCPPCPAPNAAGGPSVFIFPPKIKDVLMISLSPIVTCVVVDVSEDDPDVQISWFVNNVEVHTAQTQTHREDYNSTLRVVSALPIQHQDWMSGKEFKCKVNNKDLGAPIERTISKPKGSVRAPQVYVLPPPEEEMTKKQVTLTCMVTDFMPEDIYVEWTNNGKTELNYKNTEPVLDSDGSYLMYSKLTVEKKNWVERNSYSCSVVHEGLHNHHTTKSFSRTPGK

SEQ ID NO: 516 - protein, 214 aa, synthetic construct
DIQMTQSPSSLPASLGDRVTINCQASQDISNYLNWYQQKPGKAPKLLIYYTNKLADGVPSRFSGSGSGRDSSFTISSLESEDIGSYYCQQYYNYPWTFGPGTKLEIKRADAAPTVSIFPPSSEQLTSGGASVVCFLNNFYPKDINVKWKIDGSERQNGVLNSWTDQDSKDSTYSMSSTLTLTKDEYERHNSYTCEATHKTSTSPIVKSFNRNEC

SEQ ID NO: 517 - protein, 449 aa, synthetic construct
QVQLVQSGAEVKKPGASVKVSCKASGYTFTGNYINWVRQAPGQGLEWMGIINPTKGWTLYAQKFQGRVTMTRDTSISTAYMELSSLRSEDTAVYYCARWHHGTWIFDYWGQGTLVTVSSASTKGPSVFPLAPSSKSTSGGTAALGCLVKDYFPEPVTVSWNSGALTSGVHTFPAVLQSSGLYSLSSVVTVPSSSLGTQTYICNVNHKPSNTKVDKRVEPKSCDKTHTCPPCPAPNAAGGPSVFIFPPKIKDVLMISLSPIVTCVVVDVSEDDPDVQISWFVNNVEVHTAQTQTHREDYNSTLRVVSALPIQHQDWMSGKEFKCKVNNKDLGAPIERTISKPKGSVRAPQVYVLPPPEEEMTKKQVTLTCMVKDFMPEDIYVEWTNNGKTELNYKNTEPVLDSDGSYFMYSRLRVEKKNWVERNSYSCSVVHEGLHNHHTTKSFSRTPGK

SEQ ID NO: 518 - protein, 682 aa, synthetic construct
QVQLVQSGAEVKKPGASVKVSCKASGYTFTGNYINWVRQAPGQGLEWMGIINPTKGWTLYAQKFQGRVTMTRDTSISTAYMELSSLRSEDTAVYYCARWHHGTWIFDYWGQGTLVTVSSASTKGPSVFPLAPSSKSTSGGTAALGCLVKDYFPEPVTVSWNSGALTSGVHTFPAVLQSSGLYSLSSVVTVPSSSLGTQTYICNVNHKPSNTKVDKRVEPKSCDGGGGSGGGGSQVQLVQSGAEVKKPGASVKVSCKASGYTFTGNYINWVRQAPGQGLEWMGIINPTKGWTLYAQKFQGRVTMTRDTSISTAYMELSSLRSEDTAVYYCARWHHGTWIFDYWGQGTLVTVSSASTKGPSVFPLAPSSKSTSGGTAALGCLVKDYFPEPVTVSWNSGALTSGVHTFPAVLQSSGLYSLSSVVTVPSSSLGTQTYICNVNHKPSNTKVDKRVEPKSCDKTHTCPPCPAPNAAGGPSVFIFPPKIKDVLMISLSPIVTCVVVDVSEDDPDVQISWFVNNVEVHTAQTQTHREDYNSTLRVVSALPIQHQDWMSGKEFKCKVNNKDLGAPIERTISKPKGSVRAPQVYVLPPPEEEMTKKQVTLTCMVKDFMPEDIYVEWTNNGKTELNYKNTEPVLDSDGSYFMYSRLRVEKKNWVERNSYSCSVVHEGLHNHHTTKSFSRTPGK

SEQ ID NO: 519 - protein, 450 aa, synthetic construct
EVQLQQSGAELVRPGALVKLSCKTSGFNIKDYFLHWVRQRPDQGLEWIGWINPDNGNTVYDPKFQGTASLTADTSSNTVYLQLSGLTSEDTAVYFCTRRDYTYEKAALDYWGQGASVIVSSAKTTAPSVYPLAPVSGDTTGSSVTLGCLVKGYFPEPVTLTWNSGSLSSGVHTFPAVLQSDLYTLSSSVTVTSSTWPSQSITCNVAHPASSTKVDKKIEPKSCDKTHTCPPCPAPNAAGGPSVFIFPPKIKDVLMISLSPIVTCVVVDVSEDDPDVQISWFVNNVEVHTAQTQTHREDYNSTLRVVSALPIQHQDWMSGKEFKCKVNNKDLGAPIERTISKPKGSVRAPQVCVLPPPEEEMTKKQVTLSCAVTDFMPEDIYVEWTNNGKTELNYKNTEPVLDSDGSYFMVSKLRVEKKNWVERNSYSCSVVHEGLHNHHTTKSFSRTPGK

SEQ ID NO: 520 - protein, 214 aa, synthetic construct
AIQMSQSPASLSASVGETVTITCRASGNIYNYLAWYQQKQGKSPHLLVYDAKTLADGVPSRFSGSGSGTQYSLKISSLQTEDSGNYYCQHFWSLPFTFGSGTKLEIKRADAAPTVSIFPPSSEQLTSGGASVVCFLNNFYPKDINVKWKIDGSERQNGVLNSWTDQDSKDSTYSMSSTLTLTKDEYERHNSYTCEATHKTSTSPIVKSFNRNEC

SEQ ID NO: 521 - protein, 707 aa, synthetic construct
QVQLQQSGTELMKPGASVKISCKASGYTFSNYWIEWIKQRPGHGLEWVGEILPGAGPTNYNEKFKGKATFTADSSSNTAYMQLSSLTSEDSAVYYCARTDYDYDWFAYWGQGTLVTVSAGGGGSGGGGSGGGGSGGGGSDIVMSQSPSSLAVSVGEKVTMSCKSSQSLLYSGNQKNYLAWYQQKPGQSPKLLIYWASTRESGVPDRFTGSGSGTDFTLTINSVKAEDLTVYYCQQYYGYPRTFGGGTKVEIKGGGGSEVQLQQSGAELVRPGALVKLSCKTSGFNIKDYFLHWVRQRPDQGLEWIGWINPDNGNTVYDPKFQGTASLTADTSSNTVYLQLSGLTSEDTAVYFCTRRDYTYEKAALDYWGQGASVIVSSAKTTAPSVYPLAPVSGDTTGSSVTLGCLVKGYFPEPVTLTWNSGSLSSGVHTFPAVLQSDLYTLSSSVTVTSSTWPSQSITCNVAHPASSTKVDKKIEPKSCDKTHTCPPCPAPNAAGGPSVFIFPPKIKDVLMISLSPIVTCVVVDVSEDDPDVQISWFVNNVEVHTAQTQTHREDYNSTLRVVSALPIQHQDWMSGKEFKCKVNNKDLGAPIERTISKPKGSVRAPQVYVLPPPEEEMTKKQVTLTCMVTDFMPEDIYVEWTNNGKTELNYKNTEPVLDSDGSYFMYSKLRVEKKNWVERNSYSCSVVHEGLHNHHTTKSFSRTPGK

SEQ ID NO: 522 - protein, 450 aa, synthetic construct
EVQLQQSGAELVRPGALVKLSCKTSGFNIKDYFLHWVRQRPDQGLEWIGWINPDNGNTVYDPKFQGTASLTADTSSNTVYLQLSGLTSEDTAVYFCTRRDYTYEKAALDYWGQGASVIVSSAKTTAPSVYPLAPVSGDTTGSSVTLGCLVKGYFPEPVTLTWNSGSLSSGVHTFPAVLQSDLYTLSSSVTVTSSTWPSQSITCNVAHPASSTKVDKKIEPKSCDKTHTCPPCPAPNAAGGPSVFIFPPKIKDVLMISLSPIVTCVVVDVSEDDPDVQISWFVNNVEVHTAQTQTHREDYNSTLRVVSALPIQHQDWMSGKEFKCKVNNKDLGAPIERTISKPKGSVRAPQVYVLPPPEEEMTKKQVTLTCMVKDFMPEDIYVEWTNNGKTELNYKNTEPVLDSDGSYFMYSRLRVEKKNWVERNSYSCSVVHEGLHNHHTTKSFSRTPGK

SEQ ID NO: 523 - protein, 119 aa, synthetic construct
QVQLVQSGAEVKKPGSSVKVSCKASGYSFTGYTMNWVRQAPGQGLEWMGLITPYNGASSYNQKFRGRVTITVDKSTSTAYMELSSLRSEDTAVYYCARGGYDGRGFDYWGQGTLVTVSS

SEQ ID NO: 524 - protein, 10 aa, synthetic construct
GYSFTGYTMN

SEQ ID NO: 525 - protein, 17 aa, synthetic construct
LITPYNGASSYNQKFRG

SEQ ID NO: 526 - protein, 10 aa, synthetic construct
GGYDGRGFDY

SEQ ID NO: 527 - protein, 106 aa, synthetic construct
EIVLTQSPATLSLSPGERATLSCSASSSVSYMHWYQQKPGLAPRRLIYDTSKLASGIPDRFSGSGSGNDYTLTISRLEPEDFAVYYCQQWSKHPLTFGQGTKVEIK

SEQ ID NO: 528 - protein, 9 aa, synthetic construct
QQWSKHPLT

SEQ ID NO: 529 - protein, 125 aa, synthetic construct
EVKLVESGGGLVQPGGSLRLSCAASGFTFNTYAMNWVRQAPGKGLEWVARIRSKYNNYATYYADSVKDRFTISRDDSKSSLYLQMNNLKTEDTAMYYCVRHGNFGNSYVSWFAYWGQGTLVTVSS

SEQ ID NO: 530 - protein, 10 aa, synthetic construct
GFTFNTYAMN

SEQ ID NO: 531 - protein, 19 aa, synthetic construct
RIRSKYNNYATYYADSVKD

SEQ ID NO: 532 - protein, 14 aa, synthetic construct
HGNFGNSYVSWFAY

SEQ ID NO: 533 - protein, 109 aa, synthetic construct
QAVVTQEPSFSVSPGGTVTLTCRSSTGAVTTSNYANWVQQTPGQAFRGLIGGTNKRAPGVPARFSGSLIGDKAALTITGAQADDESIYFCALWYSNLWVFGGGTKLTVL

SEQ ID NO: 534 - protein, 14 aa, synthetic construct
RSSTGAVTTSNYAN

SEQ ID NO: 535 - protein, 7 aa, synthetic construct
GTNKRAP

SEQ ID NO: 536 - protein, 9 aa, synthetic construct
ALWYSNLWV

SEQ ID NO: 537 - protein, 119 aa, synthetic construct
QVQLVQSGAEVKKPGASVKVSCKASGYTFTGNYINWVRQAPGQGLEWMGIINPTKGWTLYAQKFQGRVTMTRDTSISTAYMELSSLRSEDTAVYYCARWHHGTWIFDYWGQGTLVTVSS

SEQ ID NO: 538 - protein, 10 aa, synthetic construct
GYTFTGNYIN

SEQ ID NO: 539 - protein, 17 aa, synthetic construct
IINPTKGWTLYAQKFQG

SEQ ID NO: 540 - protein, 10 aa, synthetic construct
WHHGTWIFDY

SEQ ID NO: 541 - protein, 119 aa, synthetic construct
QVQLQQSGTELMKPGASVKISCKASGYTFSNYWIEWIKQRPGHGLEWVGEILPGAGPTNYNEKFKGKATFTADSSSNTAYMQLSSLTSEDSAVYYCARTDYDYDWFAYWGQGTLVTVSA

SEQ ID NO: 542 - protein, 10 aa, synthetic construct
GYTFSNYWIE

SEQ ID NO: 543 - protein, 17 aa, synthetic construct
EILPGAGPTNYNEKFKG

SEQ ID NO: 544 - protein, 10 aa, synthetic construct
TDYDYDWFAY

SEQ ID NO: 545 - protein, 17 aa, synthetic construct
KSSQSLLYSGNQKNYLA

SEQ ID NO: 546 - protein, 7 aa, synthetic construct
WASTRES

SEQ ID NO: 547 - protein, 9 aa, synthetic construct
QQYYGYPRT

SEQ ID NO: 548 - protein, 104 aa, synthetic construct
ASTKGPSVFPLAPSSKSTSGGTAALGCLVKDYFPEPVTVSWNSGALTSGVHTFPAVLQSSGLYSLSSVVTVPSSSLGTQTYICNVNHKPSNTKVDKRVEPKSCD

SEQ ID NO: 549 - protein, 103 aa, synthetic construct
ASTKGPSVFPLAPSSKSTSGGTAALGCLVKDYFPEPVTVSWNSGALTSGVHTFPAVLQSSGLYSLSSVVTVPSSSLGTQTYICNVNHKPSNTKVDKRVEPKSC

SEQ ID NO: 550 - protein, 227 aa, synthetic construct
DKTHTCPPCPAPELLGGPSVFLFPPKPKDTLMISRTPEVTCVVVDVSHEDPEVKFNWYVDGVEVHNAKTKPREEQYASTYRVVSVLTVLHQDWLNGKEYKCKVSNKALPAPIEKTISKAKGQPREPQVCTLPPSREEMTKNQVSLSCAVKGFYPSDIAVEWESNGQPENNYKTTPPVLDSDGSFFLVSKLTVDKSRWQQGNVFSCSVMHEALHNHYTQKSLSLSPGK

SEQ ID NO: 551 - protein, 104 aa, synthetic construct
ASTKGPSVFPLAPSSKSTSGGTAALGCLVKDYFPEPVTVSWNSGALTSGVHTFPAVLQSSGLYSLSSVVTVPSSSLGTQTYICNVNHKPSNTKVDKKVEPKSCD

SEQ ID NO: 552 - protein, 103 aa, synthetic construct
ASTKGPSVFPLAPSSKSTSGGTAALGCLVKDYFPEPVTVSWNSGALTSGVHTFPAVLQSSGLYSLSSVVTVPSSSLGTQTYICNVNHKPSNTKVDKKVEPKSC

SEQ ID NO: 553 - protein, 227 aa, synthetic construct
DKTHTCPPCPAPELLGGPSVFLFPPKPKDTLMISRTPEVTCVVVDVSHEDPEVKFNWYVDGVEVHNAKTKPREEQYASTYRVVSVLTVLHQDWLNGKEYKCKVSNKALPAPIEKTISKAKGQPREPQVYTLPPSREEMTKNQVSLTCLVKGFYPSDIAVEWESNGQPENNYKTTPPVLDSDGSFFLYSKLTVDKSRWQQGNVFSCSVMHEALHNHYTQKSLSLSPGK

SEQ ID NO: 554 - protein, 330 aa, synthetic construct
ASTKGPSVFPLAPSSKSTSGGTAALGCLVKDYFPEPVTVSWNSGALTSGVHTFPAVLQSSGLYSLSSVVTVPSSSLGTQTYICNVNHKPSNTKVDKRVEPKSCDKTHTCPPCPAPELLGGPSVFLFPPKPKDTLMISRTPEVTCVVVDVSHEDPEVKFNWYVDGVEVHNAKTKPREEQYASTYRVVSVLTVLHQDWLNGKEYKCKVSNKALPAPIEKTISKAKGQPREPQVYTLPPSRDELTKNQVSLTCLVKGFYPSDIAVEWESNGQPENNYKTTPPVLDSDGSFFLYSRLTVDKSRWQQGNVFSCSVMHEALHNHYTQKSLSLSPGK

SEQ ID NO: 555 - protein, 227 aa, synthetic construct
DKTHTCPPCPAPELLGGPSVFLFPPKPKDTLMISRTPEVTCVVVDVSHEDPEVKFNWYVDGVEVHNAKTKPREEQYASTYRVVSVLTVLHQDWLNGKEYKCKVSNKALPAPIEKTISKAKGQPREPQVYTLPPSRDELTKNQVSLTCLVKGFYPSDIAVEWESNGQPENNYKTTPPVLDSDGSFFLYSRLTVDKSRWQQGNVFSCSVMHEALHNHYTQKSLSLSPGK

SEQ ID NO: 556 - protein, 330 aa, synthetic construct
ASTKGPSVFPLAPSSKSTSGGTAALGCLVKDYFPEPVTVSWNSGALTSGVHTFPAVLQSSGLYSLSSVVTVPSSSLGTQTYICNVNHKPSNTKVDKRVEPKSCDKTHTCPPCPAPELLGGPSVFLFPPKPKDTLMISRTPEVTCVVVDVSHEDPEVKFNWYVDGVEVHNAKTKPREEQYASTYRVVSVLTVLHQDWLNGKEYKCKVSNKALPAPIEKTISKAKGQPREPQVYTLPPSRDELTKNQVSLTCLVKGFYPSDIAVEWESNGQPENNYKTTPPVLDSDGSFLLYSKLTVDKSRWQQGNVFSCSVMHEALHNHYTQKSLSLSPGK

SEQ ID NO: 557 - protein, 227 aa, synthetic construct
DKTHTCPPCPAPELLGGPSVFLFPPKPKDTLMISRTPEVTCVVVDVSHEDPEVKFNWYVDGVEVHNAKTKPREEQYASTYRVVSVLTVLHQDWLNGKEYKCKVSNKALPAPIEKTISKAKGQPREPQVYTLPPSRDELTKNQVSLTCLVKGFYPSDIAVEWESNGQPENNYKTTPPVLDSDGSFLLYSKLTVDKSRWQQGNVFSCSVMHEALHNHYTQKSLSLSPGK

SEQ ID NO: 558 - protein, 106 aa, synthetic construct
GQPKANPTVTLFPPSSEELQANKATLVCLISDFYPGAVTVAWKADGSPVKAGVETTKPSKQSNNKYAASSYLSLTPEQWKSHRSYSCQVTHEGSTVEKTVAPTECS

SEQ ID NO: 559 - protein, 330 aa, synthetic construct
ASTKGPSVFPLAPSSKSTSGGTAALGCLVKDYFPEPVTVSWNSGALTSGVHTFPAVLQSSGLYSLSSVVTVPSSSLGTQTYICNVNHKPSNTKVDKRVEPKSCDKTHTCPPCPAPNAAGGPSVFIFPPKIKDVLMISLSPIVTCVVVDVSEDDPDVQISWFVNNVEVHTAQTQTHREDYNSTLRVVSALPIQHQDWMSGKEFKCKVNNKDLGAPIERTISKPKGSVRAPQVCVLPPPEEEMTKKQVTLSCAVTDFMPEDIYVEWTNNGKTELNYKNTEPVLDSDGSYFMVSKLRVEKKNWVERNSYSCSVVHEGLHNHHTTKSFSRTPGK

SEQ ID NO: 560 - protein, 227 aa, synthetic construct
DKTHTCPPCPAPNAAGGPSVFIFPPKIKDVLMISLSPIVTCVVVDVSEDDPDVQISWFVNNVEVHTAQTQTHREDYNSTLRVVSALPIQHQDWMSGKEFKCKVNNKDLGAPIERTISKPKGSVRAPQVCVLPPPEEEMTKKQVTLSCAVTDFMPEDIYVEWTNNGKTELNYKNTEPVLDSDGSYFMVSKLRVEKKNWVERNSYSCSVVHEGLHNHHTTKSFSRTPGK

SEQ ID NO: 561 - protein, 109 aa, synthetic construct
DIVLTQPPSVSGAPGQRVTISCSGSSSNIGSNYVSWYQQLPGTAPKLLIYNDNQRPSGVPDRFSGSKSGTSASLAITGLQSEDEADYYCSTYDRRTFSVFGGGTKLTVL

SEQ ID NO: 562 - protein, 13 aa, synthetic construct
SGSSSNIGSNYVS

SEQ ID NO: 563 - protein, 7 aa, synthetic construct
NDNQRPS

SEQ ID NO: 564 - protein, 10 aa, synthetic construct
STYDRRTFSV

SEQ ID NO: 565 - protein, 330 aa, synthetic construct
ASTKGPSVFPLAPSSKSTSGGTAALGCLVKDYFPEPVTVSWNSGALTSGVHTFPAVLQSSGLYSLSSVVTVPSSSLGTQTYICNVNHKPSNTKVDKRVEPKSCDKTHTCPPCPAPNAAGGPSVFIFPPKIKDVLMISLSPIVTCVVVDVSEDDPDVQISWFVNNVEVHTAQTQTHREDYNSTLRVVSALPIQHQDWMSGKEFKCKVNNKDLGAPIERTISKPKGSVRAPQVYVLPPPEEEMTKKQVTLTCMVTDFMPEDIYVEWTNNGKTELNYKNTEPVLDSDGSYFMYSKLRVEKKNWVERNSYSCSVVHEGLHNHHTTKSFSRTPGK

SEQ ID NO: 566 - protein, 227 aa, synthetic construct
DKTHTCPPCPAPNAAGGPSVFIFPPKIKDVLMISLSPIVTCVVVDVSEDDPDVQISWFVNNVEVHTAQTQTHREDYNSTLRVVSALPIQHQDWMSGKEFKCKVNNKDLGAPIERTISKPKGSVRAPQVYVLPPPEEEMTKKQVTLTCMVTDFMPEDIYVEWTNNGKTELNYKNTEPVLDSDGSYFMYSKLRVEKKNWVERNSYSCSVVHEGLHNHHTTKSFSRTPGK

SEQ ID NO: 567 - protein, 116 aa, synthetic construct
EVQLVESGGGLVQPGKSLKLSCEASGFTFSGYGMHWVRQAPGRGLESVAYITSSSINIKYADAVKGRFTVSRDNAKNLLFLQMNILKSEDTAMYYCARFDWDKNYWGQGTMVTVSS

SEQ ID NO: 568 - protein, 10 aa, synthetic construct
GFTFSGYGMH

SEQ ID NO: 569 - protein, 17 aa, synthetic construct
YITSSSINIKYADAVKG

SEQ ID NO: 570 - protein, 7 aa, synthetic construct
FDWDKNY

SEQ ID NO: 571 - protein, 329 aa, synthetic construct
AKTTAPSVYPLAPVSGDTTGSSVTLGCLVKGYFPEPVTLTWNSGSLSSGVHTFPAVLQSDLYTLSSSVTVTSSTWPSQSITCNVAHPASSTKVDKKIEPKSCDKTHTCPPCPAPNAAGGPSVFIFPPKIKDVLMISLSPIVTCVVVDVSEDDPDVQISWFVNNVEVHTAQTQTHREDYNSTLRVVSALPIQHQDWMSGKEFKCKVNNKDLGAPIERTISKPKGSVRAPQVYVLPPPEEEMTKKQVTLTCMVTDFMPEDIYVEWTNNGKTELNYKNTEPVLDSDGSYLMYSKLTVEKKNWVERNSYSCSVVHEGLHNHHTTKSFSRTPGK

SEQ ID NO: 572 - protein, 102 aa, synthetic construct
AKTTAPSVYPLAPVSGDTTGSSVTLGCLVKGYFPEPVTLTWNSGSLSSGVHTFPAVLQSDLYTLSSSVTVTSSTWPSQSITCNVAHPASSTKVDKKIEPKSC

SEQ ID NO: 573 - protein, 227 aa, synthetic construct
DKTHTCPPCPAPNAAGGPSVFIFPPKIKDVLMISLSPIVTCVVVDVSEDDPDVQISWFVNNVEVHTAQTQTHREDYNSTLRVVSALPIQHQDWMSGKEFKCKVNNKDLGAPIERTISKPKGSVRAPQVYVLPPPEEEMTKKQVTLTCMVTDFMPEDIYVEWTNNGKTELNYKNTEPVLDSDGSYLMYSKLTVEKKNWVERNSYSCSVVHEGLHNHHTTKSFSRTPGK

SEQ ID NO: 574 - protein, 107 aa, synthetic construct
DIQMTQSPSSLPASLGDRVTINCQASQDISNYLNWYQQKPGKAPKLLIYYTNKLADGVPSRFSGSGSGRDSSFTISSLESEDIGSYYCQQYYNYPWTFGPGTKLEIK

SEQ ID NO: 575 - protein, 11 aa, synthetic construct
QASQDISNYLN

SEQ ID NO: 576 - protein, 7 aa, synthetic construct
YTNKLAD

SEQ ID NO: 577 - protein, 9 aa, synthetic construct
QQYYNYPWT

SEQ ID NO: 578 - protein, 330 aa, synthetic construct
ASTKGPSVFPLAPSSKSTSGGTAALGCLVKDYFPEPVTVSWNSGALTSGVHTFPAVLQSSGLYSLSSVVTVPSSSLGTQTYICNVNHKPSNTKVDKRVEPKSCDKTHTCPPCPAPNAAGGPSVFIFPPKIKDVLMISLSPIVTCVVVDVSEDDPDVQISWFVNNVEVHTAQTQTHREDYNSTLRVVSALPIQHQDWMSGKEFKCKVNNKDLGAPIERTISKPKGSVRAPQVYVLPPPEEEMTKKQVTLTCMVKDFMPEDIYVEWTNNGKTELNYKNTEPVLDSDGSYFMYSRLRVEKKNWVERNSYSCSVVHEGLHNHHTTKSFSRTPGK

SEQ ID NO: 579 - protein, 227 aa, synthetic construct
DKTHTCPPCPAPNAAGGPSVFIFPPKIKDVLMISLSPIVTCVVVDVSEDDPDVQISWFVNNVEVHTAQTQTHREDYNSTLRVVSALPIQHQDWMSGKEFKCKVNNKDLGAPIERTISKPKGSVRAPQVYVLPPPEEEMTKKQVTLTCMVKDFMPEDIYVEWTNNGKTELNYKNTEPVLDSDGSYFMYSRLRVEKKNWVERNSYSCSVVHEGLHNHHTTKSFSRTPGK

SEQ ID NO: 580 - protein, 121 aa, synthetic construct
EVQLQQSGAELVRPGALVKLSCKTSGFNIKDYFLHWVRQRPDQGLEWIGWINPDNGNTVYDPKFQGTASLTADTSSNTVYLQLSGLTSEDTAVYFCTRRDYTYEKAALDYWGQGASVIVSS

SEQ ID NO: 581 - protein, 10 aa, synthetic construct
GFNIKDYFLH

SEQ ID NO: 582 - protein, 17 aa, synthetic construct
WINPDNGNTVYDPKFQG

SEQ ID NO: 583 - protein, 12 aa, synthetic construct
RDYTYEKAALDY

SEQ ID NO: 584 - protein, 329 aa, synthetic construct
AKTTAPSVYPLAPVSGDTTGSSVTLGCLVKGYFPEPVTLTWNSGSLSSGVHTFPAVLQSDLYTLSSSVTVTSSTWPSQSITCNVAHPASSTKVDKKIEPKSCDKTHTCPPCPAPNAAGGPSVFIFPPKIKDVLMISLSPIVTCVVVDVSEDDPDVQISWFVNNVEVHTAQTQTHREDYNSTLRVVSALPIQHQDWMSGKEFKCKVNNKDLGAPIERTISKPKGSVRAPQVCVLPPPEEEMTKKQVTLSCAVTDFMPEDIYVEWTNNGKTELNYKNTEPVLDSDGSYFMVSKLRVEKKNWVERNSYSCSVVHEGLHNHHTTKSFSRTPGK

SEQ ID NO: 585 - protein, 107 aa, synthetic construct
AIQMSQSPASLSASVGETVTITCRASGNIYNYLAWYQQKQGKSPHLLVYDAKTLADGVPSRFSGSGSGTQYSLKISSLQTEDSGNYYCQHFWSLPFTFGSGTKLEIK

SEQ ID NO: 586 - protein, 11 aa, synthetic construct
RASGNIYNYLA

SEQ ID NO: 587 - protein, 7 aa, synthetic construct
DAKTLAD

SEQ ID NO: 588 - protein, 9 aa, synthetic construct
QHFWSLPFT

SEQ ID NO: 589 - protein, 329 aa, synthetic construct
AKTTAPSVYPLAPVSGDTTGSSVTLGCLVKGYFPEPVTLTWNSGSLSSGVHTFPAVLQSDLYTLSSSVTVTSSTWPSQSITCNVAHPASSTKVDKKIEPKSCDKTHTCPPCPAPNAAGGPSVFIFPPKIKDVLMISLSPIVTCVVVDVSEDDPDVQISWFVNNVEVHTAQTQTHREDYNSTLRVVSALPIQHQDWMSGKEFKCKVNNKDLGAPIERTISKPKGSVRAPQVYVLPPPEEEMTKKQVTLTCMVTDFMPEDIYVEWTNNGKTELNYKNTEPVLDSDGSYFMYSKLRVEKKNWVERNSYSCSVVHEGLHNHHTTKSFSRTPGK

SEQ ID NO: 590 - protein, 682 aa, synthetic construct
QVQLVQSGAEVKKPGSSVKVSCKASGYSFTGYTMNWVRQAPGQGLEWMGLITPYNGASSYNQKFRGRVTITVDKSTSTAYMELSSLRSEDTAVYYCARGGYDGRGFDYWGQGTLVTVSSASTKGPSVFPLAPSSKSTSGGTAALGCLVKDYFPEPVTVSWNSGALTSGVHTFPAVLQSSGLYSLSSVVTVPSSSLGTQTYICNVNHKPSNTKVDKKVEPKSCDGGGGSGGGGSQVQLVQSGAEVKKPGSSVKVSCKASGYSFTGYTMNWVRQAPGQGLEWMGLITPYNGASSYNQKFRGRVTITVDKSTSTAYMELSSLRSEDTAVYYCARGGYDGRGFDYWGQGTLVTVSSASTKGPSVFPLAPSSKSTSGGTAALGCLVKDYFPEPVTVSWNSGALTSGVHTFPAVLQSSGLYSLSSVVTVPSSSLGTQTYICNVNHKPSNTKVDKRVEPKSCDKTHTCPPCPAPELLGGPSVFLFPPKPKDTLMISRTPEVTCVVVDVSHEDPEVKFNWYVDGVEVHNAKTKPREEQYASTYRVVSVLTVLHQDWLNGKEYKCKVSNKALPAPIEKTISKAKGQPREPQVCTLPPSREEMTKNQVSLSCAVKGFYPSDIAVEWESNGQPENNYKTTPPVLDSDGSFFLVSKLTVDKSRWQQGNVFSCSVMHEALHNHYTQKSLSLSPGK

SEQ ID NO: 591 - protein, 449 aa, synthetic construct
QVQLVQSGAEVKKPGSSVKVSCKASGHDFRLTYIHWVRQAPGQGLEWMGRVSAGSGNVKYNEKFKGRVTITADTSTSTAYMELSSLRSEDTAVYYCAVSYYSYDVLDYWGQGTTVTVSSASTKGPSVFPLAPSSKSTSGGTAALGCLVKDYFPEPVTVSWNSGALTSGVHTFPAVLQSSGLYSLSSVVTVPSSSLGTQTYICNVNHKPSNTKVDKRVEPKSCDKTHTCPPCPAPELLGGPSVFLFPPKPKDTLMISRTPEVTCVVVDVSHEDPEVKFNWYVDGVEVHNAKTKPREEQYASTYRVVSVLTVLHQDWLNGKEYKCKVSNKALPAPIEKTISKAKGQPREPQVCTLPPSREEMTKNQVSLSCAVKGFYPSDIAVEWESNGQPENNYKTTPPVLDSDGSFFLVSKLTVDKSRWQQGNVFSCSVMHEALHNHYTQKSLSLSPGK

SEQ ID NO: 592 - protein, 330 aa, synthetic construct
ASTKGPSVFPLAPSSKSTSGGTAALGCLVKDYFPEPVTVSWNSGALTSGVHTFPAVLQSSGLYSLSSVVTVPSSSLGTQTYICNVNHKPSNTKVDKRVEPKSCDKTHTCPPCPAPELLGGPSVFLFPPKPKDTLMISRTPEVTCVVVDVSHEDPEVKFNWYVDGVEVHNAKTKPREEQYASTYRVVSVLTVLHQDWLNGKEYKCKVSNKALPAPIEKTISKAKGQPREPQVCTLPPSREEMTKNQVSLSCAVKGFYPSDIAVEWESNGQPENNYKTTPPVLDSDGSFFLVSKLTVDKSRWQQGNVFSCSVMHEALHNHYTQKSLSLSPGK

SEQ ID NO: 593 - protein, 370 aa, synthetic construct
APTSSSTKKTQLQLEHLLLDLQMILNGINNYKNPKLTRMLTFKFYMPKKATELKHLQCLEEELKPLEEVLNLAQSKNFHLRPRDLISNINVIVLELKGSETTFMCEYADETATIVEFLNRWITFAQSIISTLTGGGGSGGGGSDKTHTCPPCPAPELLGGPSVFLFPPKPKDTLMISRTPEVTCVVVDVSHEDPEVKFNWYVDGVEVHNAKTKPREEQYASTYRVVSVLTVLHQDWLNGKEYKCKVSNKALPAPIEKTISKAKGQPREPQVYTLPPCREEMTKNQVSLWCLVKGFYPSDIAVEWESNGQPENNYKTTPPVLDSDGSFFLYSKLTVDKSRWQQGNVFSCSVMHEALHNHYTQKSLSLSPGK

SEQ ID NO: 594 - protein, 227 aa, synthetic construct
DKTHTCPPCPAPELLGGPSVFLFPPKPKDTLMISRTPEVTCVVVDVSHEDPEVKFNWYVDGVEVHNAKTKPREEQYASTYRVVSVLTVLHQDWLNGKEYKCKVSNKALPAPIEKTISKAKGQPREPQVYTLPPCREEMTKNQVSLWCLVKGFYPSDIAVEWESNGQPENNYKTTPPVLDSDGSFFLYSKLTVDKSRWQQGNVFSCSVMHEALHNHYTQKSLSLSPGK

SEQ ID NO: 595 - protein, 370 aa, synthetic construct; identical to SEQ ID NO: 593

SEQ ID NO: 596 - protein, 227 aa, synthetic construct; identical to SEQ ID NO: 594

SEQ ID NO: 597 - protein, 449 aa, synthetic construct; identical to SEQ ID NO: 591

SEQ ID NO: 598 - protein, 330 aa, synthetic construct; identical to SEQ ID NO: 592

SEQ ID NO: 599-1003 - skipped (405 entries)

SEQ ID NO: 1004 - protein, 721 aa, synthetic construct
METDTLLLWVLLLWVPGSTGQVQLVQSGAEVKKPGSSVKVSCKASGYSFTTYYIHWVRQAPGQGLEWMGWFFPGSGNIKYNEKFKGRVTITADTSTSTAYMELSSLRSEDTAVYYCAGSYYSYDVLDYWGQGTTVTVSSGGGGSGGGGSGGGGSGGGGSDIQMTQSPSFLSASVGDRVTITCKASQNVGINVVWHQQKPGKAPKALIYSSSHRYSGVPSRFSGSGSGTEFTLTISSLQPEDFATYFCQQFKSYPLTFGQGTKLEIKGGGGSQVTLRESGPALVKPTQTLTLTCTFSGFSLSTSGMGVGWIRQPPGKALEWLAHIWWDDDKRYNPALKSRLTISKDTSKNQVFLTMTNMDPVDTATYYCARMELWSYYFDYWGQGTTVTVSSASTKGPSVFPLAPSSKSTSGGTAALGCLVKDYFPEPVTVSWNSGALTSGVHTFPAVLQSSGLYSLSSVVTVPSSSLGTQTYICNVNHKPSNTKVDKKVEPKSCDKTHTCPPCPAPELLGGPSVFLFPPKPKDTLMISRTPEVTCVVVDVSHEDPEVKFNWYVDGVEVHNAKTKPREEQYASTYRVVSVLTVLHQDWLNGKEYKCKVSNKALPAPIEKTISKAKGQPREPQVYTLPPSREEMTKNQVSLTCLVKGFYPSDIAVEWESNGQPENNYKTTPPVLDSDGSFFLYSKLTVDKSRWQQGNVFSCSVMHEALHNHYTQKSLSLSPGK

SEQ ID NO: 1005 - protein, 233 aa, synthetic construct
METPAQLLFLLLLWLPDTTGENVLTQSPATLSLSPGERATLSCSASSSVSYMHWYQQKPGQAPRLLIYDTSKLASGIPARFSGSGSGTDHTLTISSLEPEDFAVYYCFQGSVYPFTFGQGTKLEIKRTVAAPSVFIFPPSDEQLKSGTASVVCLLNNFYPREAKVQWKVDNALQSGNSQESVTEQDSKDSTYSLSSTLTLSKADYEKHKVYACEVTHQGLSSPVTKSFNRGEC

SEQ ID NO: 1006 - protein, 721 aa, synthetic construct
METDTLLLWVLLLWVPGSTGQVQLVQSGAEVKKPGSSVKVSCKASGYSFTTYYIHWVRQAPGQGLEWMGWFFPGSGNIKYNEKFKGRVTITADTSTSTAYMELSSLRSEDTAVYYCAGSYYSYDVLDYWGQGTTVTVSSGGGGSGGGGSGGGGSGGGGSDIQMTQSPSFLSASVGDRVTITCKASQNVGINVVWHQQKPGKAPKALIYSSSHRYSGVPSRFSGSGSGTEFTLTISSLQPEDFATYFCQQFKSYPLTFGQGTKLEIKGGGGSQVQLVESGGGVVQPGRSLRLSCAASGIDFSRYWMSWVRQAPGKGLEWVGEINPDSSTINYAPSLKDRFTISRDNSKNTLYLQMSSLRAEDTAVYYCASLYYDYGDAMDYWGQGTTVTVSSASTKGPSVFPLAPSSKSTSGGTAALGCLVKDYFPEPVTVSWNSGALTSGVHTFPAVLQSSGLYSLSSVVTVPSSSLGTQTYICNVNHKPSNTKVDKKVEPKSCDKTHTCPPCPAPELLGGPSVFLFPPKPKDTLMISRTPEVTCVVVDVSHEDPEVKFNWYVDGVEVHNAKTKPREEQYASTYRVVSVLTVLHQDWLNGKEYKCKVSNKALPAPIEKTISKAKGQPREPQVYTLPPSREEMTKNQVSLTCLVKGFYPSDIAVEWESNGQPENNYKTTPPVLDSDGSFFLYSKLTVDKSRWQQGNVFSCSVMHEALHNRFTQKSLSLSPGK

SEQ ID NO: 1007 - protein, 234 aa, synthetic construct
METDTLLLWVLLLWVPGSTGDIQMTQSPSSLSASVGDRVTITCKASQSVDSNVAWYQQKPEKAPKALIFSASLRFSGVPSRFSGSGSGTDFTLTISSLQPEDFATYFCQQYNNYPLTFGQGTKLEIKRTVAAPSVFIFPPSDEQLKSGTASVVCLLNNFYPREAKVQWKVDNALQSGNSQESVTEQDSKDSTYSLSSTLTLSKADYEKHKVYACEVTHQGLSSPVTKSFNRGEC

SEQ ID NO: 1008-1099 - skipped (92 entries)

SEQ ID NO: 1100 - protein, 119 aa, synthetic construct; identical to SEQ ID NO: 9

SEQ ID NO: 1101 - protein, 106 aa, synthetic construct
QSVLTQPPSVSEAPRQRVTISCKASQNVGINVVWHQQLPGKAPKALIYSSSHRYSGVSDRFSGSGSGTSFSLAISGLQSEDEADYFCQQFKSYPLTFGTGTKVTVL

SEQ ID NO: 1102 - protein, 5 aa, synthetic construct
SAYMH

SEQ ID NO: 1103 - protein, 17 aa, synthetic construct
RIDPATGKTKYAPKFQA

SEQ ID NO: 1104 - protein, 10 aa, synthetic construct
SLNWDYGLDY

SEQ ID NO: 1105 - protein, 7 aa, synthetic construct
GFNIKSA

SEQ ID NO: 1106 - protein, 6 aa, synthetic construct
DPATGK

SEQ ID NO: 1107 - protein, 15 aa, synthetic construct
RASKSVSILGTHLIH

SEQ ID NO: 1108 - protein, 7 aa, synthetic construct
AASNLES

SEQ ID NO: 1109 - protein, 9 aa, synthetic construct
QQSIEDPWT

SEQ ID NO: 1110 - protein, 11 aa, synthetic construct
SKSVSILGTHL

SEQ ID NO: 1111 - protein, 111 aa, synthetic construct
DIVLTQSPASLAVSLGQRATISCRASKSVSILGTHLIHWYQQKPGQPPKLLIYAASNLESGVPARFSGSGSETVFTLNIHPVEEEDAATYFCQQSIEDPWTFGGGTKLGIK

SEQ ID NO: 1112 - protein, 119 aa, synthetic construct
EVQLQQSVADLVRPGASLKLSCTASGFNIKSAYMHWVIQRPDQGPECLGRIDPATGKTKYAPKFQAKATITADTSSNTAYLQLSSLTSEDTAIYYCTRSLNWDYGLDYWGQGTSVTVSS

SEQ ID NO: 1113 - protein, 119 aa, synthetic construct
QVQLVQSGAEVKKPGASVKVSCKASGFNIKSAYMHWVRQAPGQGLEWMGRIDPATGKTKYAPKFQARVTMTADTSTNTAYMELSSLRSEDTAVYYCARSLNWDYGLDYWGQGTLVTVSS

SEQ ID NO: 1114 - protein, 119 aa, synthetic construct
QVQLVQSGAEVKKPGASVKVSCKASGFNIKSAYMHWVRQAPGQEPGCMGRIDPATGKTKYAPKFQARVTMTADTSINTAYTELSSLRSEDTATYYCARSLNWDYGLDYWGQGTLVTVSS

SEQ ID NO: 1115 - protein, 119 aa, synthetic construct
QVQLVQSGAEVKKPGSSVKVSCKASGFNIKSAYMHWVRQAPGQGLEWMGRIDPATGKTKYAPKFQARVTITADTSTNTAYMELSSLRSEDTAVYYCARSLNWDYGLDYWGQGTLVTVSS

SEQ ID NO: 1116 - protein, 119 aa, synthetic construct
QVQLVQSGAEVKKPGASVKVSCKASGFNIKSAYMHWVRQAPGQRLEWMGRIDPATGKTKYAPKFQARVTITADTSANTAYMELSSLRSEDTAVYYCARSLNWDYGLDYWGQGTLVTVSS

SEQ ID NO: 1117 - protein, 109 aa, synthetic construct
EIVLTQSPATLSLSPGERATLSCRASKSVSILGTHLIHWYQQKPGQAPRLLIYAASNLESGIPARFSGSGSETDFTLTISSLEPEDFAVYFCQQSIEDPFGGGTKVEIK

SEQ ID NO: 1118 - protein, 109 aa, synthetic construct
EIVLTQSPATLSLSPGERATLSCRASKSVSILGTHLIHWYQQKPGLAPRLLIYAASNLESGIPDRFSGSGSETDFTLTISRLEPEDFAVYFCQQSIEDPFGGGTKVEIK

SEQ ID NO: 1119 - protein, 109 aa, synthetic construct
EIVLTQSPGTLSLSPGERATLSCRASKSVSILGTHLIHWYQQKPGQAPRLLIYAASNLESGIPDRFSGSGSETDFTLTISRLEPEDFAVYFCQQSIEDPFGGGTKVEIK

SEQ ID NO: 1120 - protein, 5 aa, synthetic construct
DTYMY

SEQ ID NO: 1121 - protein, 17 aa, synthetic construct
RIDPANGNTKYDPKFQD

SEQ ID NO: 1122 - protein, 9 aa, synthetic construct
GSYYYAMDY

SEQ ID NO: 1123 - protein, 7 aa, synthetic construct
GFKTEDT

SEQ ID NO: 1124 - protein, 6 aa, synthetic construct
DPANGN

SEQ ID NO: 1125 - protein, 10 aa, synthetic construct
GFKTEDTYMY

SEQ ID NO: 1126 - protein, 15 aa, synthetic construct
RASESVDSYGNSFMH

SEQ ID NO: 1127 - protein, 7 aa, synthetic construct
RASNLES

SEQ ID NO: 1128 - protein, 9 aa, synthetic construct
QQSNEDPYT

SEQ ID NO: 1129 - protein, 111 aa, synthetic construct
DIVLTQSPASLAVSLGQRATISCRASESVDSYGNSFMHWYQQKPGQPPKLLIYRASNLESGIPARFSGSGSRTDFTLTINPVEADDVATYYCQQSNEDPYTFGGGTKLEIK

SEQ ID NO: 1130 - protein, 118 aa, synthetic construct
EVQLQQSGAELVKPGASVKLSCTASGFKTEDTYMYWVKQRPEQGLEWIGRIDPANGNTKYDPKFQDKATITADSSSNTAYLQLSSLPSEDTAVYYCARGSYYYAMDYWGQGTSVTVSS

SEQ ID NO: 1131 - protein, 118 aa, synthetic construct
QVQLVQSGAEVKKPGSSVKVSCKASGFKTEDTYMYWVRQAPGQGLEWIGRIDPANGNTKYDPKFQDRATITADSSTNTAYMELSSLRSEDTAVYYCARGSYYYAMDYWGQGTLVTVSS

SEQ ID NO: 1132 - protein, 118 aa, synthetic construct
QVQLVQSGAEVKKPGASVKVSCKASGFKTEDTYMYWVRQAPGQRLEWIGRIDPANGNTKYDPKFQDRATITADSSANTAYMELSSLRSEDTAVYYCARGSYYYAMDYWGQGTLVTVSS

SEQ ID NO: 1133 - protein, 118 aa, synthetic construct
EVQLVESGGGLVQPGGSLKLSCAASGFKTEDTYMYWVRQASGKGLEWIGRIDPANGNTKYDPKFQDRATISADSSKNTAYLQMNSLKTEDTAVYYCARGSYYYAMDYWGQGTLVTVSS

SEQ ID NO: 1134 - protein, 118 aa, synthetic construct
EVQLVQSGAEVKKPGESLRISCKASGFKTEDTYMYWVRQMPGKGLEWIGRIDPANGNTKYDPKFQDQATISADSSINTAYLQWSSLKASDTAMYYCARGSYYYAMDYWGQGTLVTVSS

SEQ ID NO: 1135 - protein, 118 aa, synthetic construct
QVQLVQSGSELKKPGASVKVSCKASGFKTEDTYMYWVRQAPGQGLEWIGRIDPANGNTKYDPKFQDRAVISADSSVNTAYLQISSLKAEDTAVYYCARGSYYYAMDYWGQGTLVTVSS

SEQ ID NO: 1136 - protein, 111 aa, synthetic construct
DIVLTQSPDSLAVSLGERATINCRASESVDSYGNSFMHWYQQKPGQPPKLLIYRASNLESGVPDRFSGSGSRTDFTLTISSLQAEDVAVYYCQQSNEDPYTFGQGTKLEIK

SEQ ID NO: 1137 - protein, 111 aa, synthetic construct
EIVLTQSPATLSLSPGERATLSCRASESVDSYGNSFMHWYQQKPGQAPKLLIYRASNLESGIPARFSGSGSRTDFTLTISRLEPEDFAVYYCQQSNEDPYTFGQGTKLEIK

SEQ ID NO: 1138 - protein, 111 aa, synthetic construct
DIQLTQSPSSLSASVGDRVTITCRASESVDSYGNSFMHWYQQKPGQAPKLLIYRASNLESGVPSRFSGSGSRTDFTLTISSLQPEDVATYYCQQSNEDPYTFGQGTKLEIK

SEQ ID NO: 1139 - protein, 111 aa, synthetic construct
AIQLTQSPSSLSASVGDRVTITCRASESVDSYGNSFMHWYQQKPGKAPKLLIYRASNLESGVPSRFSGSGSRTDFTLTISSLQPEDFATYYCQQSNEDPYTFGQGTKLEIK

SEQ ID NO: 1140 - protein, 111 aa, synthetic construct
EIVLTQSPDFQSVTPKEKVTITCRASESVDSYGNSFMHWYQQKPDQSPKLLIYRASNLESGVPSRFSGSGSRTDFTLTINSLEAEDAATYYCQQSNEDPYTFGQGTKLEIK

SEQ ID NO: 1141 - protein, 5 aa, synthetic construct
SYAMS

SEQ ID NO: 1142 - protein, 17 aa, synthetic construct
HISNGGDYIYYADTVKG

SEQ ID NO: 1143 - protein, 12 aa, synthetic construct
PSYYSDPWFFDV

SEQ ID NO: 1144 - protein, 7 aa, synthetic construct
GFTFRSY

SEQ ID NO: 1145 - protein, 6 aa, synthetic construct
SNGGDY

SEQ ID NO: 1146 - protein, 10 aa, synthetic construct
GFTFRSYAMS

SEQ ID NO: 1147 - protein, 10 aa, synthetic construct
SAGSSVSFMH

SEQ ID NO: 1148 - protein, 7 aa, synthetic construct
DTSKLAS

SEQ ID NO: 1149 - protein, 9 aa, synthetic construct
LQGSGFPLT

SEQ ID NO: 1150 - protein, 6 aa, synthetic construct
GSSVSF

SEQ ID NO: 1151 - protein, 106 aa, synthetic construct
ENVLTQSPAIMSASPGEKVTMTCSAGSSVSFMHWYQQKSSTSPKLWIYDTSKLASGVPGRFSGSGSGNSFSLTISSMEAEDVAIYYCLQGSGFPLTFGSGTKLEIK

SEQ ID NO: 1152 - protein, 121 aa, synthetic construct
DVKLVESGEGLVKPGGSLKLSCAASGFTFRSYAMSWVRQTPEKRLEWVAHISNGGDYIYYADTVKGRFTISRDNARNTLYLQMSSLKSEDTAMYYCTRPSYYSDPWFFDVWGTGTTVTVSS

SEQ ID NO: 1153 - protein, 121 aa, synthetic construct
EVQLVESGGGLVQPGGSLRLSCAASGFTFRSYAMSWVRQAPGKGLEWVAHISNGGDYIYYADTVKGRFTISRDNAKNSLYLQMNSLRAEDTAVYYCTRPSYYSDPWFFDVWGQGTTVTVSS

SEQ ID NO: 1154 - protein, 121 aa, synthetic construct
QVQLVESGGGVVQPGRSLRLSCAASGFTFRSYAMSWVRQAPGKGLEWVAHISNGGDYIYYADTVKGRFTISRDNSKNTLYLQMSSLRAEDTAVYYCTRPSYYSDPWFFDVWGQGTTVTVSS

SEQ ID NO: 1155 - protein, 121 aa, synthetic construct
EVQLVESGGGLVQPGGSLRLSCAASGFTFRSYAMSWVRQAPGKGLEWVAHISNGGDYIYYADTVKGRFTISRDNSKNTLYLQMNSLRAEDTAVYYCTRPSYYSDPWFFDVWGQGTTVTVSS

SEQ ID NO: 1156 - protein, 121 aa, synthetic construct
QVQLVQSGSELKKPGASVKVSCKASGFTFRSYAMSWVRQAPGQGLEWVAHISNGGDYIYYADTVKGRFVISRDNSVNTLYLQISSLKAEDTAVYYCTRPSYYSDPWFFDVWGQGTTVTVSS

SEQ ID NO: 1157 - protein, 121 aa, synthetic construct
QVQLVQSGAEVKKPGASVKVSCKASGFTFRSYAMSWVRQAPGQRLEWVAHISNGGDYIYYADTVKGRFTITRDNSANTLYMELSSLRSEDTAVYYCTRPSYYSDPWFFDVWGQGTTVTVSS

SEQ ID NO: 1158 - protein, 106 aa, synthetic construct
ENVLTQSPATLSLSPGERATLSCSAGSSVSFMHWYQQKPGQAPKLLIYDTSKLASGIPARFSGSGSGNDFTLTISSLEPEDFAVYYCLQGSGFPLTFGQGTKLEIK

SEQ ID NO: 1159 - protein, 106 aa, synthetic construct
ENVLTQSPDFQSVTPKEKVTITCSAGSSVSFMHWYQQKPDQSPKLLIYDTSKLASGVPSRFSGSGSGNDFTLTINSLEAEDAATYYCLQGSGFPLTFGQGTKLEIK

SEQ ID NO: 1160 - protein, 106 aa, synthetic construct
DNQLTQSPSSLSASVGDRVTITCSAGSSVSFMHWYQQKPGKVPKLLIYDTSKLASGVPSRFSGSGSGNDFTLTISSLQPEDVATYYCLQGSGFPLTFGQGTKLEIK

SEQ ID NO: 1161 - protein, 106 aa, synthetic construct
ANQLTQSPSSLSASVGDRVTITCSAGSSVSFMHWYQQKPGKAPKLLIYDTSKLASGVPSRFSGSGSGNDFTLTISSLQPEDFATYYCLQGSGFPLTFGQGTKLEIK

SEQ ID NO: 1162 - protein, 106 aa, synthetic construct
DNVLTQSPDSLAVSLGERATINCSAGSSVSFMHWYQQKPGQPPKLLIYDTSKLASGVPDRFSGSGSGNDFTLTISSLQAEDVAVYYCLQGSGFPLTFGQGTKLEIK

SEQ ID NO: 1163 - protein, 5 aa, synthetic construct
DYNIH

SEQ ID NO: 1164 - protein, 17 aa, synthetic construct
YINPYNGRTGYNQKFKA

SEQ ID NO: 1165 - protein, 9 aa, synthetic construct
WDGSSYFDY

SEQ ID NO: 1166 - protein, 10 aa, synthetic construct
GYTFTDYNIH

SEQ ID NO: 1167 - protein, 6 aa, synthetic construct
NPYNGR

SEQ ID NO: 1168 - protein, 10 aa, synthetic construct
SASSSVSYMH

SEQ ID NO: 1169 - protein, 7 aa, synthetic construct
EISKLAS

SEQ ID NO: 1170 - protein, 9 aa, synthetic construct
QQWNYPLLT

SEQ ID NO: 1171 - protein, 106 aa, synthetic construct
EIVLTQSPAITAASLGQKVTITCSASSSVSYMHWYQQKSGTSPKPWIYEISKLASGVPARFSGSGSGTSYSLTISSMEAEDAAIYYCQQWNYPLLTFGAGTKLELK

SEQ ID NO: 1172 - protein, 118 aa, synthetic construct
EVQLQQSGPVLVKPGASVRMSCKASGYTFTDYNIHWVKQSHGRSLEWVGYINPYNGRTGYNQKFKAKATLTVDKSSSTAYMDLRSLTSEDSAVYYCARWDGSSYFDYWGQGTTLTVSS

SEQ ID NO: 1173 - protein, 118 aa, synthetic construct
QVQLVQSGAEVKKPGSSVKVSCKASGYTFTDYNIHWVRQAPGQGLEWVGYINPYNGRTGYNQKFKARATLTVDKSTSTAYMELSSLRSEDTAVYYCARWDGSSYFDYWGQGTTVTVSS

SEQ ID NO: 1174 - protein, 118 aa, synthetic construct
QVQLVQSGAEVKKPGASVKVSCKASGYTFTDYNIHWVRQAPGQGLEWVGYINPYNGRTGYNQKFKARATLTVDKSTSTAYMELRSLRSDDMAVYYCARWDGSSYFDYWGQGTTVTVSS

SEQ ID NO: 1175 - protein, 118 aa, synthetic construct
QVQLVQSGAEVKKPGASVKVSCKASGYTFTDYNIHWVRQATGQGLEWVGYINPYNGRTGYNQKFKARATLTVNKSISTAYMELSSLRSEDTAVYYCARWDGSSYFDYWGQGTTVTVSS

SEQ ID NO: 1176 - protein, 118 aa, synthetic construct
EVQLVESGGGLVQPGRSLRLSCTASGYTFTDYNIHWVRQAPGKGLEWVGYINPYNGRTGYNQKFKARATLSVDKSKSIAYLQMNSLKTEDTAVYYCARWDGSSYFDYWGQGTTVTVSS

SEQ ID NO: 1177 - protein, 118 aa, synthetic construct
QVQLVQSGSELKKPGASVKVSCKASGYTFTDYNIHWVRQAPGQGLEWVGYINPYNGRTGYNQKFKARAVLSVDKSVSTAYLQISSLKAEDTAVYYCARWDGSSYFDYWGQGTTVTVSS

SEQ ID NO: 1178 - protein, 106 aa, synthetic construct
EIVLTQSPATLSLSPGERATLSCSASSSVSYMHWYQQKPGQAPKLLIYEISKLASGIPARFSGSGSGTDYTLTISSLEPEDFAVYYCQQWNYPLLTFGQGTKLEIK

SEQ ID NO: 1179 - protein, 106 aa, synthetic construct
EIVLTQSPATLSLSPGERATLSCSASSSVSYMHWYQQKPGQAPKLLIYEISKLASGIPARFSGSGSGTDYTLTISRLEPEDFAVYYCQQWNYPLLTFGQGTKLEIK

SEQ ID NO: 1180 - protein, 106 aa, synthetic construct
EIVLTQSPDFQSVTPKEKVTITCSASSSVSYMHWYQQKPDQSPKLLIYEISKLASGVPSRFSGSGSGTDYTLTINSLEAEDAATYYCQQWNYPLLTFGQGTKLEIK

SEQ ID NO: 1181 - protein, 106 aa, synthetic construct
DIQLTQSPSFLSASVGDRVTITCSASSSVSYMHWYQQKPGKAPKLLIYEISKLASGVPSRFSGSGSGTEYTLTISSLQPEDFATYYCQQWNYPLLTFGQGTKLEIK

SEQ ID NO: 1182 - protein, 106 aa, synthetic construct
AIQLTQSPSSLSASVGDRVTITCSASSSVSYMHWYQQKPGKAPKLLIYEISKLASGVPSRFSGSGSGTDYTLTISSLQPEDFATYYCQQWNYPLLTFGQGTKLEIK

SEQ ID NO: 1183 - protein, 106 aa, synthetic construct
AIRLTQSPFSLSASVGDRVTITCSASSSVSYMHWYQQKPAKAPKLFIYEISKLASGVPSRFSGSGSGTDYTLTISSLQPEDFATYYCQQWNYPLLTFGQGTKLEIK

SEQ ID NO: 1184 - protein, 106 aa, synthetic construct
DIVLTQSPDSLAVSLGERATINCSASSSVSYMHWYQQKPGQPPKLLIYEISKLASGVPDRFSGSGSGTDYTLTISSLQAEDVAVYYCQQWNYPLLTFGQGTKLEIK

SEQ ID NO: 1185 - protein, 5 aa, synthetic construct
GSWMN

SEQ ID NO: 1186 - protein, 17 aa, synthetic construct
RIYPGDGDTDYSGKFKG

SEQ ID NO: 1187 - protein, 12 aa, synthetic construct
SGYFNYVPVFDY

SEQ ID NO: 1188 - protein, 7 aa, synthetic construct
GYTFSGS

SEQ ID NO: 1189 - protein, 6 aa, synthetic construct
YPGDGD

SEQ ID NO: 1190 - protein, 10 aa, synthetic construct
GYTFSGSWMN

SEQ ID NO: 1191 - protein, 10 aa, synthetic construct
SANSTVGYIH

SEQ ID NO: 1192 - protein, 7 aa, synthetic construct
TTSNLAS

SEQ ID NO: 1193 - protein, 8 aa, synthetic construct
HQWSFYPT

SEQ ID NO: 1194 - protein, 6 aa, synthetic construct
NSTVGY

SEQ ID NO: 1195 - protein, 105 aa, synthetic construct
QIVLTQSPAIMSASLGEEIALTCSANSTVGYIHWYQQKSGTSPKLLIYTTSNLASGVPSRFSGSGSGTFYSLTISSVEAEDAADYFCHQWSFYPTFGGGTKLEIK

SEQ ID NO: 1196 - protein, 121 aa, synthetic construct
QIQLQQSGPEVVKPGASVQISCKASGYTFSGSWMNWVKQRPGKGLEWIGRIYPGDGDTDYSGKFKGRATLTADKSSSTAYMRLSSLTSEDSAVYFCARSGYFNYVPVFDYWGQGTTLSVSS

SEQ ID NO: 1197 - protein, 121 aa, synthetic construct
QIQLVQSGAEVKKPGASVKVSCKASGYTFSGSWMNWVRQAPGQGLEWIGRIYPGDGDTDYSGKFKGRATLTADKSTSTAYMELSSLRSEDTAVYYCARSGYFNYVPVFDYWGQGTTVTVSS

SEQ ID NO: 1198 - protein, 121 aa, synthetic construct
QIQLVQSGAEVKKPGSSVKVSCKASGYTFSGSWMNWVRQAPGQGLEWIGRIYPGDGDTDYSGKFKGRATLTADKSTSTAYMELSSLRSEDTAVYYCARSGYFNYVPVFDYWGQGTTVTVSS

SEQ ID NO: 1199 - protein, 121 aa, synthetic construct
EIQLVQSGAEVKKPGESLKISCKASGYTFSGSWMNWVRQMPGKGLEWIGRIYPGDGDTDYSGKFKGQATLSADKSISTAYLQWSSLKASDTAMYYCARSGYFNYVPVFDYWGQGTTVTVSS

SEQ ID NO: 1200 - protein, 121 aa, synthetic construct
QIQLVQSGSELKKPGASVKVSCKASGYTFSGSWMNWVRQAPGQGLEWIGRIYPGDGDTDYSGKFKGRAVLSADKSVSTAYLQISSLKAEDTAVYYCARSGYFNYVPVFDYWGQGTTVTVSS

SEQ ID NO: 1201 - protein, 121 aa, synthetic construct
QIQLVQSGSELKKPGASVKVSCKASGYTFSGSWMNWVRQAPGQGLEWIGRIYPGDGDTDYSGKFKGRAVLSADKSVSMAYLQISSLKAEDTAVYYCARSGYFNYVPVFDYWGQGTTVTVSS

SEQ ID NO: 1202 - protein, 121 aa, synthetic construct
EIQLVESGGGLVQPGRSLRLSCTASGYTFSGSWMNWVRQAPGKGLEWIGRIYPGDGDTDYSGKFKGRATLSADKSKSIAYLQMNSLKTEDTAVYYCARSGYFNYVPVFDYWGQGTTVTVSS

SEQ ID NO: 1203 - protein, 105 aa, synthetic construct
EIVLTQSPATLSLSPGERATLSCSANSTVGYIHWYQQKPGQAPKLLIYTTSNLASGIPARFSGSGSGTDYTLTISSLEPEDFAVYFCHQWSFYPTFGQGTKLEIK

SEQ ID NO: 1204 - protein, 105 aa, synthetic construct
DIQLTQSPSFLSASVGDRVTITCSANSTVGYIHWYQQKPGKAPKLLIYTTSNLASGVPSRFSGSGSGTEYTLTISSLQPEDFATYFCHQWSFYPTFGQGTKLEIK

SEQ ID NO: 1205 - protein, 105 aa, synthetic construct
EIVLTQSPATLSLSPGERATLSCSANSTVGYIHWYQQKPGQAPKLLIYTTSNLASGIPARFSGSGPGTDYTLTISSLEPEDFAVYFCHQWSFYPTFGQGTKLEIK

SEQ ID NO: 1206 - protein, 105 aa, synthetic construct
DIVLTQSPDSLAVSLGERATINCSANSTVGYIHWYQQKPGQPPKLLIYTTSNLASGVPDRFSGSGSGTDYTLTISSLQAEDVAVYFCHQWSFYPTFGQGTKLEIK

SEQ ID NO: 1207 - protein, 105 aa, synthetic construct
EIVLTQSPDFQSVTPKEKVTITCSANSTVGYIHWYQQKPDQSPKLLIYTTSNLASGVPSRFSGSGSGTDYTLTINSLEAEDAATYFCHQWSFYPTFGQGTKLEIK

SEQ ID NO: 1208 - protein, 5 aa, synthetic construct
DYYMY

SEQ ID NO: 1209 - protein, 17 aa, synthetic construct
TISGGGSYTYSPDSVKG

SEQ ID NO: 1210 - protein, 14 aa, synthetic construct
ERDIYYGNFNAMVY

SEQ ID NO: 1211 - protein, 7 aa, synthetic construct
GFTFSDY

SEQ ID NO: 1212 - protein, 6 aa, synthetic construct
SGGGSY

SEQ ID NO: 1213 - protein, 10 aa, synthetic construct
GFTFSDYYMY

SEQ ID NO: 1214 - protein, 15 aa, synthetic construct
RASKSVSTSGYSYMH

SEQ ID NO: 1215 - protein, 7 aa, synthetic construct
LASNLES

SEQ ID NO: 1216 - protein, 9 aa, synthetic construct
QHSRDLPWT

SEQ ID NO: 1217 - protein, 11 aa, synthetic construct
SKSVSTSGYSY

SEQ ID NO: 1218 - protein, 111 aa, synthetic construct
DIVLTQSPVSLTVSLGQRATISCRASKSVSTSGYSYMHWYQQKPGQPPKLLIYLASNLESGVPARFSGSGSGTDFTLNIHPVEEEDAATYYCQHSRDLPWTFGGGTKLEIK

SEQ ID NO: 1219 - protein, 123 aa, synthetic construct
EVQLVESGGGLVKPGGSLKLSCAASGFTFSDYYMYWVRQTPEKRLEWVATISGGGSYTYSPDSVKGRFTISRDNAKNNLYLQMSSLRSEDTAMYFCARERDIYYGNFNAMVYWGRGTSVTVSS

SEQ ID NO: 1220 - protein, 123 aa, synthetic construct
EVQLLESGGGLVQPGGSLRLSCAASGFTFSDYYMYWVRQAPGKGLEWVATISGGGSYTYSPDSVKGRFTISRDNSKNTLYLQMNSLRAEDTAVYYCARERDIYYGNFNAMVYWGRGTLVTVSS

SEQ ID NO: 1221 - protein, 123 aa, synthetic construct
EVQLVESGGGLVQPGGSLRLSCAASGFTFSDYYMYWVRQAPGKGLEWVATISGGGSYTYSPDSVKGRFTISRDNAKNSLYLQMNSLRAEDTAVYYCARERDIYYGNFNAMVYWGRGTLVTVSS

SEQ ID NO: 1222 - protein, 123 aa, synthetic construct
QVQLVESGGGVVQPGRSLRLSCAASGFTFSDYYMYWVRQAPGKGLEWVATISGGGSYTYSPDSVKGRFTISRDNSKNTLYLQMNSLRAEDTAVYYCARERDIYYGNFNAMVYWGRGTLVTVSS

SEQ ID NO: 1223 - protein, 123 aa, synthetic construct
QVQLVESGGGLVKPGGSLRLSCAASGFTFSDYYMYWIRQAPGKGLEWVATISGGGSYTYSPDSVKGRFTISRDNAKNSLYLQMNSLRAEDTAVYYCARERDIYYGNFNAMVYWGRGTLVTVSS

SEQ ID NO: 1224 - protein, 111 aa, synthetic construct
EIVLTQSPGTLSLSPGERATLSCRASKSVSTSGYSYMHWYQQKPGQAPRLLIYLASNLESGIPDRFSGSGSGTDFTLTISRLEPEDFAVYYCQHSRDLPWTFGGGTKVEIK

SEQ ID NO: 1225 - protein, 111 aa, synthetic construct
EIVLTQSPATLSLSPGERATLSCRASKSVSTSGYSYMHWYQQKPGQAPRLLIYLASNLESGIPARFSGSGSGTDFTLTISSLEPEDFAVYYCQHSRDLPWTFGGGTKVEIK

SEQ ID NO: 1226 - protein, 111 aa, synthetic construct
DIQLTQSPSTLSASVGDRVTITCRASKSVSTSGYSYMHWYQQKPGKAPKLLIYLASNLESGVPSRFSGSGSGTEFTLTISSLQPDDFATYYCQHSRDLPWTFGGGTKVEIK

SEQ ID NO: 1227 - protein, 111 aa, synthetic construct
AIQLTQSPSSLSASVGDRVTITCRASKSVSTSGYSYMHWYQQKPGKAPKLLIYLASNLESGVPSRFSGSGSGTDFTLTISSLQPEDFATYYCQHSRDLPWTFGGGTKVEIK

SEQ ID NO: 1228 - skipped

SEQ ID NO: 1229 - protein, 5 aa, synthetic construct
GYFWN

SEQ ID NO: 1230 - protein, 16 aa, synthetic construct
YISYDGSNNYNPSLKN

SEQ ID NO: 1231 - protein, 11 aa, synthetic construct
PSPGTGYAVDY

SEQ ID NO: 1232 - protein, 8 aa, synthetic construct
GYSITSGY

SEQ ID NO: 1233 - protein, 6 aa, synthetic construct
SYDGSN

SEQ ID NO: 1234 - protein, 11 aa, synthetic construct
GYSITSGYFWN

SEQ ID NO: 1235 - protein, 16 aa, synthetic construct
RSSQSLVHSNGNTYLH

SEQ ID NO: 1236 - protein, 7 aa, synthetic construct
KVSNRFS

SEQ ID NO: 1237 - protein, 9 aa, synthetic construct
SQSTHVPFT

SEQ ID NO: 1238 - protein, 12 aa, synthetic construct
SQSLVHSNGNTY

SEQ ID NO: 1239 - protein, 112 aa, synthetic construct
NVVMTQTPLSLPVSLGDQASISCRSSQSLVHSNGNTYLHWYLQKPGQSPKFLIYKVSNRFSGVPDRFSGGGSGTEFTLKISRVEAEDLGVYFCSQSTHVPFTFGSGTKLEIK

SEQ ID NO: 1240 - protein, 120 aa, synthetic construct
NVQLQESGPGLVKPSQSLSLTCSVAGYSITSGYFWNWIRQFPGNKLEWMGYISYDGSNNYNPSLKNRISITRDTSKNQFFLKLNSVTTEDTATYYCASPSPGTGYAVDYWGQGTSVTVSS

SEQ ID NO: 1241 - protein, 120 aa, synthetic construct
QVQLQESGPGLVKPSETLSLTCTVSGYSITSGYFWNWIRQPPGKGLEWIGYISYDGSNNYNPSLKNRVTISRDTSKNQFSLKLSSVTAADTAVYYCASPSPGTGYAVDYWGQGTLVTVSS

SEQ ID NO: 1242 - protein, 120 aa, synthetic construct; identical to SEQ ID NO: 1241

SEQ ID NO: 1243 - protein, 120 aa, synthetic construct
QVQLVESGGGLVQPGGSLRLSCSVSGYSITSGYFWNWVRQAPGKGLEWVGYISYDGSNNYNPSLKNRFTISRDTSKNTFYLQMNSLRAEDTAVYYCASPSPGTGYAVDYWGQGTLVTVSS

SEQ ID NO: 1244 - protein, 111 aa, synthetic construct
VVMTQSPGTLSLSPGERATLSCRSSQSLVHSNGNTYLHWYQQKPGQAPRFLIYKVSNRFSGIPDRFSGSGSGTDFTLTISRLEPEDFAVYFCSQSTHVPFTFGQGTKLEIK

SEQ ID NO: 1245 - protein, 112 aa, synthetic construct
EVVMTQSPATLSLSPGERATLSCRSSQSLVHSNGNTYLHWYQQKPGQAPRFLIYKVSNRFSGIPARFSGSGSGTDFTLTISSLEPEDFAVYFCSQSTHVPFTFGQGTKLEIK

SEQ ID NO: 1246 - protein, 112 aa, synthetic construct
EVVMTQSPATLSVSPGERATLSCRSSQSLVHSNGNTYLHWYQQKPGQAPRFLIYKVSNRFSGIPARFSGSGSGTEFTLTISSLQSEDFAVYFCSQSTHVPFTFGQGTKLEIK

SEQ ID NO: 1247 - protein, 112 aa, synthetic construct
DVQMTQSPSSLSASVGDRVTITCRSSQSLVHSNGNTYLHWYQQKPGKAPKFLIYKVSNRFSGVPSRFSGSGSGTDFTFTISSLQPEDIATYFCSQSTHVPFTFGQGTKLEIK

SEQ ID NO: 1248 - protein, 5 aa, synthetic construct
DYIVH

SEQ ID NO: 1249 - protein, 17 aa, synthetic construct
WINTYTGTPTYADDFEG

SEQ ID NO: 1250 - protein, 13 aa, synthetic construct
SWRRGIRGIGFDY

SEQ ID NO: 1251 - protein, 7 aa, synthetic construct
GYTFTDY

SEQ ID NO: 1252 - protein, 6 aa, synthetic construct
NTYTGT

SEQ ID NO: 1253 - protein, 10 aa, synthetic construct
GYTFTDYIVH

SEQ ID NO: 1254 - protein, 11 aa, synthetic construct
KASKSINKYLA

SEQ ID NO: 1255 - protein, 7 aa, synthetic construct
DGSTLQS

SEQ ID NO: 1256 - protein, 9 aa, synthetic construct
QQHNEYPPT

SEQ ID NO: 1257 - protein, 7 aa, synthetic construct
SKSINKY

SEQ ID NO: 1258 - protein, 107 aa, synthetic construct
DVQMTQSPYNLAASPGESVSINCKASKSINKYLAWYQQKPGKPNKLLIYDGSTLQSGIPSRFSGSGSGTDFTLTIRGLEPEDFGLYYCQQHNEYPPTFGAGTKLELK

SEQ ID NO: 1259 - protein, 122 aa, synthetic construct
QLQLVQSGPELREPGESVKISCKASGYTFTDYIVHWVKQAPGKGLKWMGWINTYTGTPTYADDFEGRFVFSLEASASTANLQISNLKNEDTATYFCARSWRRGIRGIGFDYWGQGVMVTVSS

SEQ ID NO: 1260 - protein, 122 aa, synthetic construct
QLQLVQSGAEVKKPGASVKVSCKASGYTFTDYIVHWVRQAPGQGLEWMGWINTYTGTPTYADDFEGWVTMTLDASISTAYMELSRLRSDDTAVYYCARSWRRGIRGIGFDYWGQGTMVTVSS

SEQ ID NO: 1261 - protein, 122 aa, synthetic construct
QLQLVQSGAEVKKPGASVKVSCKASGYTFTDYIVHWVRQAPGQGLEWMGWINTYTGTPTYADDFEGRVTMTLDASTSTAYMELSSLRSEDTAVYYCARSWRRGIRGIGFDYWGQGTMVTVSS

SEQ ID NO: 1262 - protein, 122 aa, synthetic construct
QLQLVQSGAEVKKPGASVKVSCKASGYTFTDYIVHWVRQAPGQRLEWMGWINTYTGTPTYADDFEGRVTITLDASASTAYMELSSLRSEDMAVYYCARSWRRGIRGIGFDYWGQGTMVTVSS

SEQ ID NO: 1263 - protein, 122 aa, synthetic construct
QLQLVQSGAEVKKPGASVKVSCKASGYTFTDYIVHWVRQATGQGLEWMGWINTYTGTPTYADDFEGRVTMTLNASISTAYMELSSLRSEDTAVYYCARSWRRGIRGIGFDYWGQGTMVTVSS

SEQ ID NO: 1264 - protein, 107 aa, synthetic construct
EVVMTQSPGTLSLSPGERATLSCKASKSINKYLAWYQQKPGQAPRLLIYDGSTLQSGIPDRFSGSGSGTDFTLTISRLEPEDFAVYYCQQHNEYPPTFGQGTKLEIK

SEQ ID NO: 1265 - protein, 107 aa, synthetic construct
EVVMTQSPATLSLSPGERATLSCKASKSINKYLAWYQQKPGQAPRLLIYDGSTLQSGIPARFSGSGSGTDFTLTISSLEPEDFAVYYCQQHNEYPPTFGQGTKLEIK

SEQ ID NO: 1266 - protein, 107 aa, synthetic construct
DVQMTQSPSSLSASVGDRVTITCKASKSINKYLAWYQQKPGKAPKLLIYDGSTLQSGVPSRFSGSGSGTDFTLTISSLQPEDFATYYCQQHNEYPPTFGQGTKLEIK

SEQ ID NO: 1267 - protein, 107 aa, synthetic construct
AVRMTQSPSSFSASTGDRVTITCKASKSINKYLAWYQQKPGKAPKLLIYDGSTLQSGVPSRFSGSGSGTDFTLTISCLQSEDFATYYCQQHNEYPPTFGQGTKLEIK

SEQ ID NO: 1268 - protein, 5 aa, synthetic construct
NYGVH

SEQ ID NO: 1269 - protein, 16 aa, synthetic construct
VIWSDGSTDYDTAFIS

SEQ ID NO: 1270 - protein, 9 aa, synthetic construct
RAVVADFDY

SEQ ID NO: 1271 - protein, 6 aa, synthetic construct
GFSLTN

SEQ ID NO: 1272 - protein, 9 aa, synthetic construct
VIWSDGSTD

SEQ ID NO: 1273 - protein, 10 aa, synthetic construct
GFSLTNYGVH

SEQ ID NO: 1274 - protein, 117 aa, synthetic construct
QVQLKQSGPGLLQPSQSLSITCTVSGFSLTNYGVHWVRQSPGKGLEWLGVIWSDGSTDYDTAFISRLSISKDNSKSQVFFKLNSLQADDTAIYYCARRAVVADFDYWGQGTTLTVSS

SEQ ID NO: 1275 - protein, 16 aa, synthetic construct
KASKEVTIFGSISALH

SEQ ID NO: 1276 - protein, 7 aa, synthetic construct
NGAKLES

SEQ ID NO: 1277 - protein, 9 aa, synthetic construct
LQNKEVPFT

SEQ ID NO: 1278 - protein, 119 aa, synthetic construct
DIVLTQSPASLAVSLGQKATISCKASKEVTIFGSISALHWYQQKPGQPPKLIYNGAKLESGVSARFSDSGSQNRSPFGNQLSFTLTIAPVEADDAATYYCLQNKEVPFTFGSGTKLEIK

SEQ ID NO: 1279 - protein, 117 aa, synthetic construct
DIVLTQSPDSLAVSLGERATINCKASKEVTIFGSISALHWYQQKPGQPPKLLYNGAKLESGVSARFGVPDRFSRSGSGLDFTLTISSLQAEDVAVYYCLQNKEVPFTFGQGTKLEIK

SEQ ID NO: 1280 - protein, 117 aa, synthetic construct
EIVLTQSPDFQSVTPKEKVTITCKASKEVTIFGSISALHWYQQKPDQSPKLLYNGAKLESGVSARFGVPSRFSRSGSGLDFTLTINSLEAEDAATYYCLQNKEVPFTFGQGTKLEIK

SEQ ID NO: 1281 - protein, 117 aa, synthetic construct
AIQLTQSPSSLSASVGDRVTITCKASKEVTIFGSISALHWYQQKPGKAPKLLYNGAKLESGVSARFGVPSRFSRSGSGLDFTLTISSLQPEDFATYYCLQNKEVPFTFGQGTKLEIK

SEQ ID NO: 1282 - protein, 117 aa, synthetic construct
DIVLTQTPLSLSVTPGQPASISCKASKEVTIFGSISALHWYLQKPGQPPKLLYNGAKLESGVSARFGVPDRFSRSGSGLDFTLKISRVEAEDVGVYYCLQNKEVPFTFGQGTKLEIK

SEQ ID NO: 1283 - protein, 117 aa, synthetic construct
QVTLKESGPVLVKPTETLTLTCTVSGFSLTNYGVHWVRQPPGKALEWLGVIWSDGSTDYDTAFISRLTISKDNSKSQVVLTMTNMDPVDTATYYCARRAVVADFDYWGQGTTVTVSS

SEQ ID NO: 1284 - protein, 117 aa, synthetic construct
QVQLQESGPGLVKPSGTLSLTCAVSGFSLTNYGVHWVRQPPGKGLEWLGVIWSDGSTDYDTAFISRLTISKDNSKSQVSLKLSSVTAADTAVYYCARRAVVADFDYWGQGTTVTVSS

SEQ ID NO: 1285 - protein, 117 aa, synthetic construct
QVQLQQSGPGLVKPSQTLSLTCAVSGFSLTNYGVHWVRQSPSRGLEWLGVIWSDGSTDYDTAFISRLTINKDNSKSQVSLQLNSVTPEDTAVYYCARRAVVADFDYWGQGTTVTVSS

SEQ ID NO: 1286 - protein, 117 aa, synthetic construct
EVQLVESGGGLVQPGPSLRLSCTVSGFSLTNYGVHWVRQAPGKGLEWLGVIWSDGSTDYDTAFISRLTISKDNSKSIVYLQMNSLKTEDTAVYYCARRAVVADFDYWGQGTTVTVSS

SEQ ID NO: 1287 - protein, 117 aa, synthetic construct
EVQLVQSGAEVKKPGESLRISCKVSGFSLTNYGVHWVRQMPGKGLEWLGVIWSDGSTDYDTAFISQLTISKDNSISTVYLQWSSLKASDTAMYYCARRAVVADFDYWGQGTTVTVSS

SEQ ID NO: 1288 - protein, 5 aa, synthetic construct
SYGMS

SEQ ID NO: 1289 - protein, 17 aa, synthetic construct
LISSGGSYTYYTDSVKG

SEQ ID NO: 1290 - protein, 8 aa, synthetic construct
HGGNFFDY

SEQ ID NO: 1291 - protein, 7 aa, synthetic construct
GFTFRSY

SEQ ID NO: 1292 - protein, 6 aa, synthetic construct
SSGGSY

SEQ ID NO: 1293 - protein, 10 aa, synthetic construct
GFTFRSYGMS

SEQ ID NO: 1294 - protein, 10 aa, synthetic construct
SVSSSVSYMH

SEQ ID NO: 1295 - protein, 7 aa, synthetic construct
DTSKLAS

SEQ ID NO: 1296 - protein, 10 aa, synthetic construct
QQWSSNPQYT

SEQ ID NO: 1297 - protein, 6 aa, synthetic construct
SSSVSY

SEQ ID NO: 1298 - protein, 5 aa, synthetic construct
SSWMN

SEQ ID NO: 1299 - protein, 17 aa, synthetic construct
RIYPGDGDTKYNGKFKG

SEQ ID NO: 1300 - protein, 10 aa, synthetic construct
RGTGGWYFDV

SEQ ID NO: 1301 - protein, 10 aa, synthetic construct
RGTGGWYFDV

SEQ ID NO: 1302 - protein, 7 aa, synthetic construct
GYAFSSS

SEQ ID NO: 1303 - protein, 6 aa, synthetic construct
YPGDGD

SEQ ID NO: 1304 - protein, 10 aa, synthetic construct
GYAFSSSWMN

SEQ ID NO: 1305 - protein, 15 aa, synthetic construct
RASESVDSSGNSFMH

SEQ ID NO: 1306 - protein, 7 aa, synthetic construct
RASNLES

SEQ ID NO: 1307 - protein, 9 aa, synthetic construct
QQSFDDPFT

SEQ ID NO: 1308 - protein, 11 aa, synthetic construct
SESVDSSGNSF

SEQ ID NO: 1309 - protein, 246 aa, synthetic construct
QVQLVQSGAEVKKPGSSVKVSCKASGHDFDKFYIHWVRQAPGQGLEWMGRVSAGSGNVKYNEKFKGRVTITADTSTSTAYMELSSLRSEDTAVYYCAGSYYSYDVLDYWGQGTTVTVSSGGGGSGGGGSGGGGSGGGGSDIQMTQSPSFLSASVGDRVTITCKASQNVGNRVAWYQQKPGKAPKALIYSSSHRYKGVPSRFSGSGSGTEFTLTISSLQPEDFATYFCQQFKSYPLTFGQGTKLEIK

SEQ ID NO: 1310 - protein, 119 aa, synthetic construct; identical to SEQ ID NO: 94

SEQ ID NO: 1311 - protein, 119 aa, synthetic construct
QVQLVQSGAEVKKPGSSVKVSCKASGTDFKLTYIHWVRQAPGQGLEWMGRIFPGSGNVKYNEKFKGRVTITADTSTSTAYMELSSLRSEDTAVYYCAVSYYSYDVLDYWGQGTTVTVSS

SEQ ID NO: 1312 - protein, 119 aa, synthetic construct
QVQLVQSGAEVKKPGSSVKVSCKASGHDFRLTYIHWVRQAPGQGLEWMGRISAGSGNVKYNEKFKGRVTITADTSTSTAYMELSSLRSEDTAVYYCAVSYYSYDVLDYWGQGTTVTVSS

SEQ ID NO: 1313 - protein, 107 aa, synthetic construct; identical to SEQ ID NO: 90

SEQ ID NO: 1314 - protein, 107 aa, synthetic construct; identical to SEQ ID NO: 141

SEQ ID NO: 1315 - protein, 5 aa, synthetic construct
AYGVN

SEQ ID NO: 1316 - protein, 16 aa, synthetic construct
MIWGDGNTDYNSALKS

SEQ ID NO: 1317 - protein, 12 aa, synthetic construct
DRVTATLYAMDY

SEQ ID NO: 1318 - protein, 7 aa, synthetic construct
GFSLTAY

SEQ ID NO: 1319 - protein, 5 aa, synthetic construct
WGDGN

SEQ ID NO: 1320 - protein, 10 aa, synthetic construct
GFSLTAYGVN

SEQ ID NO: 1321 - protein, 11 aa, synthetic construct
SASQGISNYLN

SEQ ID NO: 1322 - protein, 7 aa, synthetic construct
YTSSLHS

SEQ ID NO: 1323 - protein, 9 aa, synthetic construct
QQYSKLPRT

SEQ ID NO: 1324 - protein, 107 aa, synthetic construct
DIQMTQSPSSLSASVGDRVTITCSASQGISNYLNWYQQTPGKAPKLLIYYTSSLHSGVPSRFSGSGSGTDYTFTISSLQPEDIATYYCQQYSKLPRTFGQGTKLQIT

SEQ ID NO: 1325 - protein, 120 aa, synthetic construct
QVQLQESGPGLVRPSQTLSLTCTVSGFSLTAYGVNWVRQPPGRGLEWLGMIWGDGNTDYNSALKSRVTMLKDTSKNQFSLRLSSVTAADTAVYYCARDRVTATLYAMDYWGQGSLVTVSS

SEQ ID NO: 1326 - protein, 246 aa, synthetic construct
QVQLVQSGAEVKKPGSSVKVSCKASGHDFRLTYIHWVRQAPGQGLEWMGRVSAGSGNTKYNEKFKGRVTITADTSTSTAYMELSSLRSEDTAVYYCAVSYYSYDVLDYWGQGTTVTVSSGGGGSGGGGSGGGGSGGGGSDIQMTQSPSFLSASVGDRVTITCKASQNVGDRVVWHQQKPGKAPKALIYSSSHRYKGVPSRFSGSGSGTEFTLTISSLQPEDFATYFCQQFKSYPLTFGQGTKLEIK

SEQ ID NO: 1327 - protein, 246 aa, synthetic construct
QVQLVQSGAEVKKPGSSVKVSCKASGHDFRLTYIHWVRQAPGQGLEWMGRVSAGSGNVKYNEKFKGRVTITADTSTSTAYMELSSLRSEDTAVYYCAVSYYSYDVLDYWGQGTTVTVSSGGGGSGGGGSGGGGSGGGGSDIQMTQSPSFLSASVGDRVTITCKASQNVGNRVVWHQQKPGKAPKALIYSSSHRYKGVPSRFSGSGSGTEFTLTISSLQPEDFATYFCQQFKSYPLTFGQGTKLEIK

SEQ ID NO: 1328 - protein, 246 aa, synthetic construct
QVQLVQSGAEVKKPGSSVKVSCKASGHDFRLTYIHWVRQAPGQGLEWMGRIYAGSGNVKYNEKFKGRVTITADTSTSTAYMELSSLRSEDTAVYYCAVSYYSYDVLDYWGQGTTVTVSSGGGGSGGGGSGGGGSGGGGSDIQMTQSPSFLSASVGDRVTITCKASQNVADRVVWHQQKPGKAPKALIYSSSHRYKGVPSRFSGSGSGTEFTLTISSLQPEDFATYFCQQFKSYPLTFGQGTKLEIK

SEQ ID NO: 1329 - protein, 246 aa, synthetic construct
QVQLVQSGAEVKKPGSSVKVSCKASGHDFKLTYIHWVRQAPGQGLEWMGRVSAGSGNTKYNEKFKGRVTITADTSTSTAYMELSSLRSEDTAVYYCAVSYYSYDVLDYWGQGTTVTVSSGGGGSGGGGSGGGGSGGGGSDIQMTQSPSFLSASVGDRVTITCKASQNVGDRVAWHQQKPGKAPKALIYSSSHRYKGVPSRFSGSGSGTEFTLTISSLQPEDFATYFCQQFKSYPLTFGQGTKLEIK

SEQ ID NO: 1330 - protein, 246 aa, synthetic construct
QVQLVQSGAEVKKPGSSVKVSCKASGHDFKLTYIHWVRQAPGQGLEWMGRVSAGSGNTKYNEKFKGRVTITADTSTSTAYMELSSLRSEDTAVYYCAVSYYSYDVLDYWGQGTTVTVSSGGGGSGGGGSGGGGSGGGGSDIQMTQSPSFLSASVGDRVTITCKASQNVDNRVAWHQQKPGKAPKALIYSSSHRYKGVPSRFSGSGSGTEFTLTISSLQPEDFATYFCQQFKSYPLTFGQGTKLEIK

SEQ ID NO: 1331 - protein, 246 aa, synthetic construct
QVQLVQSGAEVKKPGSSVKVSCKASGHDFRLTYIHWVRQAPGQGLEWMGRVSAGSGNVKYNEKFKGRVTITADTSTSTAYMELSSLRSEDTAVYYCAVSYYSYDVLDYWGQGTTVTVSSGGGGSGGGGSGGGGSGGGGSDIQMTQSPSFLSASVGDRVTITCKASQNVADRVVWHQQKPGKAPKALIYSSSHRYKGVPSRFSGSGSGTEFTLTISSLQPEDFATYFCQQFKSYPLTFGQGTKLEIK

SEQ ID NO: 1332 - protein, 246 aa, synthetic construct
QVQLVQSGAEVKKPGSSVKVSCKASGHDFRLTYIHWVRQAPGQGLEWMGRVYAGSGNTKYNEKFKGRVTITADTSTSTAYMELSSLRSEDTAVYYCAVSYYSYDVLDYWGQGTTVTVSSGGGGSGGGGSGGGGSGGGGSDIQMTQSPSFLSASVGDRVTITCKASQNVEDRVVWHQQKPGKAPKALIYSSSHRYKGVPSRFSGSGSGTEFTLTISSLQPEDFATYFCQQFKSYPLTFGQGTKLEIK

SEQ ID NO: 1333 - protein, 246 aa, synthetic construct
QVQLVQSGAEVKKPGSSVKVSCKASGHDFKLTYIHWVRQAPGQGLEWMGRVSAGSGNTKYNEKFKGRVTITADTSTSTAYMELSSLRSEDTAVYYCAVSYYSYDVLDYWGQGTTVTVSSGGGGSGGGGSGGGGSGGGGSDIQMTQSPSFLSASVGDRVTITCKASQNVADRVVWHQQKPGKAPKALIYSSSHRYKGVPSRFSGSGSGTEFTLTISSLQPEDFATYFCQQFKSYPLTFGQGTKLEIK

SEQ ID NO: 1334 - protein, 246 aa, synthetic construct
QVQLVQSGAEVKKPGSSVKVSCKASGHDFKLTYIHWVRQAPGQGLEWMGRISAGSGNTKYNEKFKGRVTITADTSTSTAYMELSSLRSEDTAVYYCAVSYYSYDVLDYWGQGTTVTVSSGGGGSGGGGSGGGGSGGGGSDIQMTQSPSFLSASVGDRVTITCKASQNVGDRVVWHQQKPGKAPKALIYSSSHRYKGVPSRFSGSGSGTEFTLTISSLQPEDFATYFCQQFKSYPLTFGQGTKLEIK

SEQ ID NO: 1335 - protein, 246 aa, synthetic construct
QVQLVQSGAEVKKPGSSVKVSCKASGHDFKLTYIHWVRQAPGQGLEWMGRIYAGSGNTKYNEKFKGRVTITADTSTSTAYMELSSLRSEDTAVYYCAVSYYSYDVLDYWGQGTTVTVSSGGGGSGGGGSGGGGSGGGGSDIQMTQSPSFLSASVGDRVTITCKASQNVGDRVVWHQQKPGKAPKALIYSSSHRYKGVPSRFSGSGSGTEFTLTISSLQPEDFATYFCQQFKSYPLTFGQGTKLEIK

SEQ ID NO: 1336 - protein, 246 aa, synthetic construct
QVQLVQSGAEVKKPGSSVKVSCKASGTDFKLTYIHWVRQAPGQGLEWMGRIFPGSGNVKYNEKFKGRVTITADTSTSTAYMELSSLRSEDTAVYYCAVSYYSYDVLDYWGQGTTVTVSSGGGGSGGGGSGGGGSGGGGSDIQMTQSPSFLSASVGDRVTITCKASQNVDNRVAWYQQKPGKAPKALIYSSSHRYKGVPSRFSGSGSGTEFTLTISSLQPEDFATYFCQQFKSYPLTFGQGTKLEIK

SEQ ID NO: 1337 - protein, 246 aa, synthetic construct
QVQLVQSGAEVKKPGSSVKVSCKASGHDFRLTYIHWVRQAPGQGLEWMGRISAGSGNVKYNEKFKGRVTITADTSTSTAYMELSSLRSEDTAVYYCAVSYYSYDVLDYWGQGTTVTVSSGGGGSGGGGSGGGGSGGGGSDIQMTQSPSFLSASVGDRVTITCKASQNVADRVAWYQQKPGKAPKALIYSSSHRYKGVPSRFSGSGSGTEFTLTISSLQPEDFATYFCQQFKSYPLTFGQGTKLEIK

SEQ ID NO: 1338 - protein, 243 aa, synthetic construct
EVQLVESGGGLVQPGGSLRLSCAASGFTFSNFGMHWVRQAPGKGLEWVSYISSGSSTIYYADTLKGRFTISRDNSKNTLYLQMNSLRAEDTAVYYCARRGEGAMDYWGQGTTVTVSSGGGGSGGGGSGGGGSGGGGSDNQLTQSPSSLSASVGDRVTITCRASSSVNYIYWYQQKPGKAPKLLIYYTSNLAPGVPSRFSGSGSGNDYTLTISSLQPEDFATYYCQQFTSSPFTFGQGTKLEIK

SEQ ID NO: 1339 - protein, 242 aa, synthetic construct
EVQLVESGGGLVQPGGSLRLSCAASGFTFSNFGMHWVRQAPGKGLEWVSYISSGSSTIYYADTLKGRFTISRDNSKNTLYLQMNSLRAEDTAVYYCARRGEGAMDYWGQGTTVTVSSGGGGSGGGGSGGGGSGGGGSSNELTQPPSVSVSPGQTARITCRASSSVNYIYWYQQKSGQAPVLVIYYTSNLAPGIPERFSGSGSGNMYTLTISGAQVEDEADYYCQQFTSSPFTFGTGTKVTVL

SEQ ID NO: 1340 - protein, 243 aa, synthetic construct
QVQLVESGGGVVQPGRSLRLSCAASGFTFSNFGMHWVRQAPGKGLEWVAYISSGSSTIYYADTLKGRFTISRDNSKNTLYLQMNSLRAEDTAVYYCARRGEGAMDYWGQGTTVTVSSGGGGSGGGGSGGGGSGGGGSDNQLTQSPSFLSASVGDRVTITCRASSSVNYIYWYQQKPGKAPKLLIYYTSNLAPGVPSRFSGSGSGNEYTLTISSLQPEDFATYYCQQFTSSPFTFGQGTKLEIK

SEQ ID NO: 1341 - protein, 243 aa, synthetic construct
QVQLVESGGGVVQPGRSLRLSCAASGFTFSNFGMHWVRQAPGKGLEWVAYISSGSSTIYYADTLKGRFTISRDNSKNTLYLQMNSLRAEDTAVYYCARRGEGAMDYWGQGTTVTVSSGGGGSGGGGSGGGGSGGGGSDNQLTQSPSSLSASVGDRVTITCRASSSVNYIYWYQQKPGKAPKLLIYYTSNLAPGVPSRFSGSGSGNDYTLTISSLQPEDFATYYCQQFTSSPFTFGQGTKLEIK

SEQ ID NO: 1342 - protein, 242 aa, synthetic construct
QVQLVESGGGVVQPGRSLRLSCAASGFTFSNFGMHWVRQAPGKGLEWVAYISSGSSTIYYADTLKGRFTISRDNSKNTLYLQMNSLRAEDTAVYYCARRGEGAMDYWGQGTTVTVSSGGGGSGGGGSGGGGSGGGGSSNELTQPPSVSVSPGQTARITCRASSSVNYIYWYQQKSGQAPVLVIYYTSNLAPGIPERFSGSGSGNMYTLTISGAQVEDEADYYCQQFTSSPFTFGTGTKVTVL

SEQ ID NO: 1343 - skipped

SEQ ID NO: 1344 - protein, 119 aa, synthetic construct
QVQLVQSGAEVKKPGSSVKVSCKASGHDFRLTYIHWVRQAPGQGLEWMGRVSAGSGNTKYNEKFKGRVTITADTSTSTAYMELSSLRSEDTAVYYCAVSYYSYDVLDYWGQGTTVTVSS

SEQ ID NO: 1345 - skipped

SEQ ID NO: 1346 - protein, 119 aa, synthetic construct
QVQLVQSGAEVKKPGSSVKVSCKASGHDFRLTYIHWVRQAPGQGLEWMGRVSAGSGNVKYNEKFKGRVTITADTSTSTAYMELSSLRSEDTAVYYCAVSYYSYDVLDYWGQGTTVTVSS

SEQ ID NO: 1347 - protein, 107 aa, synthetic construct
DIQMTQSPSFLSASVGDRVTITCKASQNVGNRVVWHQQKPGKAPKALIYSSSHRYKGVPSRFSGSGSGTEFTLTISSLQPEDFATYFCQQFKSYPLTFGQGTKLEIK

SEQ ID NO: 1348 - protein, 119 aa, synthetic construct
QVQLVQSGAEVKKPGSSVKVSCKASGHDFRLTYIHWVRQAPGQGLEWMGRIYAGSGNVKYNEKFKGRVTITADTSTSTAYMELSSLRSEDTAVYYCAVSYYSYDVLDYWGQGTTVTVSS

SEQ ID NO: 1349 - protein, 107 aa, synthetic construct
DIQMTQSPSFLSASVGDRVTITCKASQNVADRVVWHQQKPGKAPKALIYSSSHRYKGVPSRFSGSGSGTEFTLTISSLQPEDFATYFCQQFKSYPLTFGQGTKLEIK

SEQ ID NO: 1350 - protein, 119 aa, synthetic construct
QVQLVQSGAEVKKPGSSVKVSCKASGHDFKLTYIHWVRQAPGQGLEWMGRVSAGSGNTKYNEKFKGRVTITADTSTSTAYMELSSLRSEDTAVYYCAVSYYSYDVLDYWGQGTTVTVSS

SEQ ID NO: 1351 - protein, 107 aa, synthetic construct; identical to SEQ ID NO: 160

SEQ ID NO: 1352 - skipped

SEQ ID NO: 1353 - protein, 107 aa, synthetic construct; identical to SEQ ID NO: 199

SEQ ID NO: 1354-1355 - skipped (2 entries)

SEQ ID NO: 1356 - protein, 119 aa, synthetic construct
QVQLVQSGAEVKKPGSSVKVSCKASGHDFRLTYIHWVRQAPGQGLEWMGRVYAGSGNTKYNEKFKGRVTITADTSTSTAYMELSSLRSEDTAVYYCAVSYYSYDVLDYWGQGTTVTVSS

SEQ ID NO: 1357 - protein, 107 aa, synthetic construct
DIQMTQSPSFLSASVGDRVTITCKASQNVEDRVVWHQQKPGKAPKALIYSSSHRYKGVPSRFSGSGSGTEFTLTISSLQPEDFATYFCQQFKSYPLTFGQGTKLEIK

SEQ ID NO: 1358-1359 - skipped (2 entries)

SEQ ID NO: 1360 - protein, 119 aa, synthetic construct
QVQLVQSGAEVKKPGSSVKVSCKASGHDFKLTYIHWVRQAPGQGLEWMGRISAGSGNTKYNEKFKGRVTITADTSTSTAYMELSSLRSEDTAVYYCAVSYYSYDVLDYWGQGTTVTVSS

SEQ ID NO: 1361 - protein, 107 aa, synthetic construct
DIQMTQSPSFLSASVGDRVTITCKASQNVGDRVVWHQQKPGKAPKALIYSSSHRYKGVPSRFSGSGSGTEFTLTISSLQPEDFATYFCQQFKSYPLTFGQGTKLEIK

SEQ ID NO: 1362 - protein, 119 aa, synthetic construct
QVQLVQSGAEVKKPGSSVKVSCKASGHDFKLTYIHWVRQAPGQGLEWMGRIYAGSGNTKYNEKFKGRVTITADTSTSTAYMELSSLRSEDTAVYYCAVSYYSYDVLDYWGQGTTVTVSS

SEQ ID NO: 1363-1364 - skipped (2 entries)

SEQ ID NO: 1365 - protein, 107 aa, synthetic construct
DIQMTQSPSFLSASVGDRVTITCRASQNVDNRLGWHQQKPGKAPKALIYSSSHRYKGVPSRFSGSGSGTEFTLTISSLQPEDFATYFCQQFKSYPLTFGQGTKLEIK

SEQ ID NO: 1366 - skipped

SEQ ID NO: 1367 - protein, 107 aa, synthetic construct
DIQMTQSPSFLSASVGDRVTITCKASQNVDNRVAWHQQKPGKAPKALIYAASSLQKGVPSRFSGSGSGTEFTLTISSLQPEDFATYFCQQFKSYPLTFGQGTKLEIK

SEQ ID NO: 1368 - skipped

SEQ ID NO: 1369 - protein, 107 aa, synthetic construct
DIQMTQSPSFLSASVGDRVTITCKASQNVDNRVAWHQQKPGKAPKALIYSSSHRYKGVPSRFSGSGSGTEFTLTISSLQPEDFATYFCLQHNSYPLTFGQGTKLEIK

SEQ ID NO: 1370 - protein, 119 aa, synthetic construct
QVQLVQSGAEVKKPGSSVKVSCKASGHDFKLTYIHWVRQAPGQGLEWMGRVSAGSGNVNYAQKFQGRVTITADTSTSTAYMELSSLRSEDTAVYYCAVSYYSYDVLDYWGQGTTVTVSS

SEQ ID NO: 1371-1375 - skipped (5 entries)

SEQ ID NO: 1376 - protein, 252 aa, synthetic construct
QVQLQQSGTELMKPGASVKISCKASGYTFSNYWIEWIKQRPGHGLEWVGEILPGAGPTNYNEKFKGKATFTADSSSNTAYMQLSSLTSEDSAVYYCARTDYDYDWFAYWGQGTLVTVSAGGGGSGGGGSGGGGSGGGGSDIVMSQSPSSLAVSVGEKVTMSCKSSQSLLYSGNQKNYLAWYQQKPGQSPKLLIYWASTRESGVPDRFTGSGSGTDFTLTINSVKAEDLTVYYCQQYYGYPRTFGGGTKVEIK

SEQ ID NO: 1377-2169 - skipped (793 entries)

SEQ ID NO: 2170 - protein, 114 aa, synthetic construct
NWVNVISDLKKIEDLIQSMHIDATLYTESDVHPSCKVTAMKCFLLELQVISLESGDASIHDTVENLIILANNSLSSNGNVTESGCKECEELEEKNIKEFLQSFVHIVQMFINTS

SEQ ID NO: 2171-2179 - skipped (9 entries)

SEQ ID NO: 2180 - protein, 77 aa, synthetic construct
MAPRRARGCRTLGLPALLLLLLLRPPATRGITCPPPMSVEHADIWVKSYSLYSRERYICNSGFKRKAGTSSLTECVL

SEQ ID NO: 2181-2189 - skipped (9 entries)

SEQ ID NO: 2190 - protein, 20 aa, synthetic construct
SGGSGGGGSGGGSGGGGSLQ

SEQ ID NO: 2191 - protein, 133 aa, synthetic construct [sequence omitted]

SEQ ID NO: 2192 - protein, 157 aa, synthetic construct
YFGKLESKLSVIRNLNDQVLFIDQGNRPLFEDMTDSDCRDNAPRTIFIISMYKDSQPRGMAVTISVKCEKISTLSCENKIISFKEMNPPDNIKDTKSDIIFFQRSVPGHDNKMQFESSSYEGYFLACEKERDLFKLILKKEDELGDRSIMFTVQNED

SEQ ID NO: 2193 - protein, 133 aa, synthetic construct [sequence omitted]

SEQ ID NO: 2194 - protein, 138 aa, synthetic construct
QDPYVKEAENLKKYFNAGHSDVADNGTLFLGILKNWKEESDRKIMQSQIVSFYFKLFKNFKDDQSIQKSVETIKEDMNVKFFNSNKKKRDDFEKLTNYSVTDLNVQRKAIHELIQVMAELSPAAKTGKRKRSQMLFRG

SEQ ID NO: 2195-2269 - skipped (75 entries)

SEQ ID NO: 2270 - protein, 133 aa, synthetic construct
APTSSSTKKTQLQLEHLLLDLQMILNGINNYKNPKLTRMLTFKFYMPKKATELKHLQCLEEELKPLEEVLNLAQSKNFHLRPRDLISNINVIVLELKGSETTFMCEYADETATIVEFLNRWITFAQSIISTLT

SEQ ID NO: 2271-2279 - skipped (9 entries)

SEQ ID NO: 2280 - protein, 133 aa, synthetic construct
APASSSTKKTQLQLEHLLLDLQMILNGINNYKNPKLTRMLTAKFAMPKKATELKHLQCLEEELKPLEEVLNGAQSKNFHLRPRDLISNINVIVLELKGSETTFMCEYADETATIVEFLNRWITFAQSIISTLT

SEQ ID NO: 2281-2289 - skipped (9 entries)

SEQ ID NO: 2290 - protein, 518 aa, synthetic construct
IWELKKDVYVVELDWYPDAPGEMVVLTCDTPEEDGITWTLDQSSEVLGSGKTLTIQVKEFGDAGQYTCHKGGEVLSHSLLLLHKKEDGIWSTDILKDQKEPKNKTFLRCEAKNYSGRFTCWWLTTISTDLTFSVKSSRGSSDPQGVTCGAATLSAERVRGDNKEYEYSVECQEDSACPAAEESLPIEVMVDAVHKLKYENYTSSFFIRDIIKPDPPKNLQLKPLKNSRQVEVSWEYPDTWSTPHSYFSLTFCVQVQGKSKREKKDRVFTDKTSATVICRKNASISVRAQDRYYSSSWSEWASVPCSGGGGSGGGGSGGGGSRNLPVATPDPGMFPCLHHSQNLLRAVSNMLQKARQTLEFYPCTSEEIDHEDITKDKTSTVEACLPLELTKNESCLNSRETSFITNGSCLASRKTSFMMALCLSSIYEDLKMYQVEFKTMNAKLLMDPKRQIFLDQNMLAVIDELMQALNFNSETVPQKSSLEEPDFYKTKIKLCILLHAFRIRAVTIDRVMSYLNAS

SEQ ID NO: 2291-2299 - skipped (9 entries)

SEQ ID NO: 2300 - protein, 340 aa, synthetic construct
SPGQGTQSENSCTHFPGNLPNMLRDLRDAFSRVKTFFQMKDQLDNLLLKESLLEDFKGYLGCQALSEMIQFYLEEVMPQAENQDPDIKAHVNSLGENLKTLRLRLRRCHRFLPCENKSKAVEQVKNAFNKLQEKGIYKAMSEFDIFINYIEAYMTMKIRNGGGGSGGGGSGGGGSGGGGSSPGQGTQSENSCTHFPGNLPNMLRDLRDAFSRVKTFFQMKDQLDNLLLKESLLEDFKGYLGCQALSEMIQFYLEEVMPQAENQDPDIKAHVNSLGENLKTLRLRLRRCHRFLPCENKSKAVEQVKNAFNKLQEKGIYKAMSEFDIFINYIEAYMTMKIRN

SEQ ID NO: 2301-2309 - skipped (9 entries)

SEQ ID NO: 2310 - protein, 166 aa, synthetic construct
SPGQGTQSENSCTHFPGNLPNMLRDLRDAFSRVKTFFQMKDQLDNLLLKESLLEDFKGYLGCQALSEMIQFYLEEVMPQAENQDPDIKAHVNSLGENLKTLRLRLRRCHRFLPCENGGGSGGKSKAVEQVKNAFNKLQEKGIYKAMSEFDIFINYIEAYMTMKIRN

SEQ ID NO: 2311-2319 - skipped (9 entries)

SEQ ID NO: 2320 - protein, 114 aa, synthetic construct
NWVNVISDLKKIEDLIQSMHIDATLYTESDVHPSCKVTAMKCFLLELQVISLASGDASIHDTVENLIILANNSLSSNGAVTESGCKECEELEEKNIKEFLQSFVHIVQMFINTS

SEQ ID NO: 2321-2999 - skipped (679 entries)

SEQ ID NO: 3000 - protein, 107 aa, synthetic construct
DIQMTQSPSFLSASVGDRVTITCSASQGISNYLNWYQQKPGKAVKLLIYYTSSLHSGVPSRFSGSGSGTEYTLTISSLQPEDFATYYCQQYSKLPRTFGGGTKVEIK

SEQ ID NO: 3001 - protein, 107 aa, synthetic construct
DIQMTQSPSSLSASVGDRVTITCSASQGISNYLNWYQQKPGKAVKLLIYYTSSLHSGVPSRFSGSGSGTDYTLTISSLQPEDFATYYCQQYSKLPRTFGGGTKVEIK

SEQ ID NO: 3002 - protein, 107 aa, synthetic construct
DIQMTQSPSSLSASVGDRVTITCSASQGISNYLNWYQQKPGKVVKLLIYYTSSLHSGVPSRFSGSGSGTDYTLTISSLQPEDVATYYCQQYSKLPRTFGGGTKVEIK

SEQ ID NO: 3003 - protein, 107 aa, synthetic construct
DIQMTQSPSSLSASVGDRVTITCSASQGISNYLNWYQQKPGQAVKLLIYYTSSLHSGVPSRFSGSGSGTDYTLTISSLQPEDVATYYCQQYSKLPRTFGGGTKVEIK

SEQ ID NO: 3004 - protein, 107 aa, synthetic construct
DIQMTQSPSSLSASVGDRVTITCSASQGISNYLNWYQQKPGKAVKLLIYYTSSLHSGVPSRFSGSGSGTDYTFTISSLQPEDIATYYCQQYSKLPRTFGGGTKVEIK

SEQ ID NO: 3005 - protein, 107 aa, synthetic construct
DIQMTQSPSSLSASVGDRVTITCSASQGISNYLNWYQQKPGKTVKLLIYYTSSLHSGIPSRFSGSGSGTDYTLTIRSLQPEDFATYYCQQYSKLPRTFGGGTKVEIK

SEQ ID NO: 3006 - protein, 107 aa, synthetic construct
AIQMTQSPSSLSASVGDRVTITCSASQGISNYLNWYQQKPGKAVKLLIYYTSSLHSGVPSRFSGSGSGTDYTLTISSLQPEDFATYYCQQYSKLPRTFGGGTKVEIK

SEQ ID NO: 3007 - protein, 107 aa, synthetic construct
DIQMTQSPSSVSASVGDRVTITCSASQGISNYLNWYQQKPGKAVKLLIYYTSSLHSGVPSRFSGSGSGTDYTLTISSLQPEDFATYYCQQYSKLPRTFGGGTKVEIK

SEQ ID NO: 3008 - protein, 107 aa, synthetic construct
DIQMTQSPSSLSASVGDRVTITCSASQGISNYLNWYQQKPGKAVKRLIYYTSSLHSGVPSRFSGSGSGTEYTLTISNLQPEDFATYYCQQYSKLPRTFGGGTKVEIK

SEQ ID NO: 3009 - protein, 107 aa, synthetic construct
AIRMTQSPFSLSASVGDRVTITCSASQGISNYLNWYQQKPAKAVKLFIYYTSSLHSGVPSRFSGSGSGTDYTLTISSLQPEDFATYYCQQYSKLPRTFGGGTKVEIK

SEQ ID NO: 3010 - protein, 107 aa, synthetic construct
DIQMTQSPSSLSASVGDRVTITCSASQGISNYLNWYQQKPGKAVKRLIYYTSSLHSGVPSRFSGSGSGTEYTLTISSLQPEDFATYYCQQYSKLPRTFGGGTKVEIK

SEQ ID NO: 3011 - protein, 107 aa, synthetic construct
DIQMTQSPSTLSASVGDRVTITCSASQGISNYLNWYQQKPGKAVKLLIYYTSSLHSGVPSRFSGSGSGTEYTLTISSLQPDDFATYYCQQYSKLPRTFGGGTKVEIK

SEQ ID NO: 3012 - protein, 107 aa, synthetic construct
DIQMTQSPSSLSASVGDRVTITCSASQGISNYLNWYQQKPGKAVKSLIYYTSSLHSGVPSRFSGSGSGTDYTLTISSLQPEDFATYYCQQYSKLPRTFGGGTKVEIK

SEQ ID NO: 3013 - protein, 107 aa, synthetic construct
DIQMTQSPSSLSASVGDRVTITCSASQGISNYLNWYQQKPGKAVKSLIYYTSSLHSGVPSKFSGSGSGTDYTLTISSLQPEDFATYYCQQYSKLPRTFGGGTKVEIK

SEQ ID NO: 3014 - protein, 107 aa, synthetic construct
DIQMTQSPSSLSASVGDRVTITCSASQGISNYLNWYQQKPEKAVKSLIYYTSSLHSGVPSRFSGSGSGTDYTLTISSLQPEDFATYYCQQYSKLPRTFGGGTKVEIK

SEQ ID NO: 3015 - protein, 107 aa, synthetic construct
DIQMTQSPSAMSASVGDRVTITCSASQGISNYLNWYQQKPGKVVKRLIYYTSSLHSGVPSRFSGSGSGTEYTLTISSLQPEDFATYYCQQYSKLPRTFGGGTKVEIK

SEQ ID NO: 3016 - protein, 107 aa, synthetic construct
DIVMTQSPDSLAVSLGERATINCSASQGISNYLNWYQQKPGQPVKLLIYYTSSLHSGVPDRFSGSGSGTDYTLTISSLQAEDVAVYYCQQYSKLPRTFGGGTKVEIK

SEQ ID NO: 3017 - protein, 107 aa, synthetic construct
EIVMTQSPGTLSLSPGERATLSCSASQGISNYLNWYQQKPGQAVKLLIYYTSSLHSGIPDRFSGSGSGTDYTLTISRLEPEDFAVYYCQQYSKLPRTFGGGTKVEIK

SEQ ID NO: 3018 - protein, 107 aa, synthetic construct
EIVMTQSPPTLSLSPGERVTLSCSASQGISNYLNWYQQKPGQAVKLLIYYTSSLHSGIPARFSGSGSGTDYTLTISSLQPEDFAVYYCQQYSKLPRTFGGGTKVEIK

SEQ ID NO: 3019 - protein, 107 aa, synthetic construct
EIVMTQSPPTLSLSPGERVTLSCSASQGISNYLNWYQQKPGQAVKLLIYYTSSLHSSIPARFSGSGSGTDYTLTISSLQPEDFAVYYCQQYSKLPRTFGGGTKVEIK

SEQ ID NO: 3020 - protein, 107 aa, synthetic construct
EIVMTQSPATLSLSPGERATLSCSASQGISNYLNWYQQKPGQAVKLLIYYTSSLHSGIPARFSGSGSGTDYTLTISSLEPEDFAVYYCQQYSKLPRTFGGGTKVEIK

SEQ ID NO: 3021 - protein, 107 aa, synthetic construct
EIVMTQSPATLSLSPGERATLSCSASQGISNYLNWYQQKPGQAVKLLIYYTSSLHSGIPARFSGSGSGTDYTLTISRLEPEDFAVYYCQQYSKLPRTFGGGTKVEIK

SEQ ID NO: 3022 - protein, 107 aa, synthetic construct
EIVMTQSPATLSLSPGERATLSCSASQGISNYLNWYQQKPGQAVKLLIYYTSSLHSGIPDRFSGSGSGTDYTLTISRLEPEDFAVYYCQQYSKLPRTFGGGTKVEIK

SEQ ID NO: 3023 - protein, 107 aa, synthetic construct
EIVMTQSPATLSLSPGERATLSCSASQGISNYLNWYQQKPGLAVKLLIYYTSSLHSGIPDRFSGSGSGTDYTLTISRLEPEDFAVYYCQQYSKLPRTFGGGTKVEIK

SEQ ID NO: 3024 - protein, 107 aa, synthetic construct
DIQMIQSPSFLSASVGDRVSIICSASQGISNYLNWYLQKPGKSVKLFIYYTSSLHSGVSSRFSGRGSGTDYTLTIISLKPEDFAAYYCQQYSKLPRTFGGGTKVEIK

SEQ ID NO: 3025 - protein, 107 aa, synthetic construct
EIVMTQSPATLSLSPGERATLSCSASQGISNYLNWYQQKPGQAVKLLIYYTSSLHSGIPARFSGSGSGTDYTLTISSLQPEDFAVYYCQQYSKLPRTFGGGTKVEIK

SEQ ID NO: 3026 - protein, 107 aa, synthetic construct
EIVMTQSPATLSLSPGERATLSCSASQGISNYLNWYQQKPGQAVKLLIYYTSSLHSGIPARFSGSGPGTDYTLTISSLEPEDFAVYYCQQYSKLPRTFGGGTKVEIK

SEQ ID NO: 3027 - protein, 107 aa, synthetic construct
DIVMTQTPLSLSVTPGQPASISCSASQGISNYLNWYLQKPGQSVKLLIYYTSSLHSGVPDRFSGSGSGTDYTLKISRVEAEDVGVYYCQQYSKLPRTFGGGTKVEIK

SEQ ID NO: 3028 - protein, 107 aa, synthetic construct
DIVMTQTPLSLSVTPGQPASISCSASQGISNYLNWYLQKPGQPVKLLIYYTSSLHSGVPDRFSGSGSGTDYTLKISRVEAEDVGVYYCQQYSKLPRTFGGGTKVEIK

SEQ ID NO: 3029 - protein, 107 aa, synthetic construct
DIVMTQSPAFLSVTPGEKVTITCSASQGISNYLNWYQQKPDQAVKLLIYYTSSLHSGVPSRFSGSGSGTDYTFTISSLEAEDAATYYCQQYSKLPRTFGGGTKVEIK

SEQ ID NO: 3030 - protein, 107 aa, synthetic construct
DIVMTQSPLSLPVTPGEPASISCSASQGISNYLNWYLQKPGQSVKLLIYYTSSLHSGVPDRFSGSGSGTDYTLKISRVEAEDVGVYYCQQYSKLPRTFGGGTKVEIK

SEQ ID NO: 3031 - protein, 107 aa, synthetic construct
DIVMTQTPLSLPVTPGEPASISCSASQGISNYLNWYLQKPGQSVKLLIYYTSSLHSGVPDRFSGSGSGTDYTLKISRVEAEDVGVYYCQQYSKLPRTFGGGTKVEIK

SEQ ID NO: 3032 - protein, 107 aa, synthetic construct
EIVMTQSPATLSVSPGERATLSCSASQGISNYLNWYQQKPGQAVKLLIYYTSSLHSGIPARFSGSGSGTEYTLTISILQSEDFAVYYCQQYSKLPRTFGGGTKVEIK

SEQ ID NO: 3033 - protein, 107 aa, synthetic construct
EIVMTQSPATLSVSPGERATLSCSASQGISNYLNWYQQKPGQAVKLLIYYTSSLHSGIPARFSGSGSGTEYTLTISSLQSEDFAVYYCQQYSKLPRTFGGGTKVEIK

SEQ ID NO: 3034 - protein, 107 aa, synthetic construct
DIVMTQSPLSLPVTLGQPASISCSASQGISNYLNWYQQRPGQSVKRLIYYTSSLHSGVPDRFSGSGSGTDYTLKISRVEAEDVGVYYCQQYSKLPRTFGGGTKVEIK

SEQ ID NO: 3035 - protein, 107 aa, synthetic construct
EITMTQSPAFMSATPGDKVNISCSASQGISNYLNWYQQKPGEAVKFIIYYTSSLHSGIPPRFSGSGYGTDYTLTINNIESEDAAYYYCQQYSKLPRTFGGGTKVEIK

SEQ ID NO: 3036 - protein, 107 aa, synthetic construct
DIVMTQTPLSSPVTLGQPASISCSASQGISNYLNWYQQRPGQPVKLLIYYTSSLHSGVPDRFSGSGAGTDYTLKISRVEAEDVGVYYCQQYSKLPRTFGGGTKVEIK

SEQ ID NO: 3037 - protein, 107 aa, synthetic construct
EIVMTQSPDFQSVTPKEKVTITCSASQGISNYLNWYQQKPDQSVKLLIYYTSSLHSGVPSRFSGSGSGTDYTLTINSLEAEDAATYYCQQYSKLPRTFGGGTKVEIK

SEQ ID NO: 3038 - protein, 107 aa, synthetic construct
EIVMTQTPLSLSITPGEQASISCSASQGISNYLNWYLQKARPVVKLLIYYTSSLHSGVPDRFSGSGSGTDYTLKISRVEAEDFGVYYCQQYSKLPRTFGGGTKVEIK

SEQ ID NO: 3039 - protein, 107 aa, synthetic construct
EIVMTQTPLSLSITPGEQASMSCSASQGISNYLNWYLQKARPVVKLLIYYTSSLHSGVPDRFSGSGSGTDYTLKISRVEAEDFGVYYCQQYSKLPRTFGGGTKVEIK

SEQ ID NO: 3040 - protein, 120 aa, synthetic construct
QVTLKESGPVLVKPTETLTLTCTVSGFSLTAYGVNWVRQPPGKALEWLGMIWGDGNTDYNSALKSRLTISKDNSKSQVVLTMTNMDPVDTATYYCARDRVTATLYAMDYWGQGTLVTVSS

SEQ ID NO: 3041 - protein, 120 aa, synthetic construct
QVTLKESGPALVKPTETLTLTCTVSGFSLTAYGVNWVRQPPGKALEWLGMIWGDGNTDYNSALKSRLIISKDNSKSQVVLTMTNMDPVDTATYYCARDRVTATLYAMDYWGQGTLVTVSS

SEQ ID NO: 3042 - protein, 120 aa, synthetic construct
QVTLKESGPALVKPTQTLTLTCTVSGFSLTAYGVNWVRQPPGKALEWLGMIWGDGNTDYNSALKSRLTISKDNSKSQVVLTMTNMDPVDTATYYCARDRVTATLYAMDYWGQGTLVTVSS

SEQ ID NO: 3043 - protein, 120 aa, synthetic construct
QVQLQESGPGLVKPSGTLSLTCAVSGFSLTAYGVNWVRQPPGKGLEWLGMIWGDGNTDYNSALKSRLTISKDNSKSQVSLKLSSVTAADTAVYYCARDRVTATLYAMDYWGQGTLVTVSS

SEQ ID NO: 3044 - protein, 120 aa, synthetic construct
QVTLKESGPTLVKPTQTLTLTCTVSGFSLTAYGVNWVRQPPGKALEWLGMIWGDGNTDYNSALKSRLTITKDNSKSQVVLTMTNMDPVDTATYYCARDRVTATLYAMDYWGQGTLVTVSS

SEQ ID NO: 3045 - protein, 120 aa, synthetic construct
QVTLKESGPALVKPTQTLTLTCTVSGFSLTAYGVNWVRQPPGKALEWLGMIWGDGNTDYNSALKSRLTITKDNSKSQVVLTMTNMDPVDTATYYCARDRVTATLYAMDYWGQGTLVTVSS

SEQ ID NO: 3046 - protein, 120 aa, synthetic construct
QVQLQESGPGLVKPSQTLSLTCTVSGFSLTAYGVNWVRQPPGKGLEWLGMIWGDGNTDYNSALKSRLTISKDNSKSQVSLKLSSVTAADTAVYYCARDRVTATLYAMDYWGQGTLVTVSS

SEQ ID NO: 3047 - protein, 120 aa, synthetic construct
QVQLQESGPGLVKPSETLSLTCTVSGFSLTAYGVNWVRQPPGKGLEWLGMIWGDGNTDYNSALKSRLTISKDNSKSQVSLKLSSVTAADTAVYYCARDRVTATLYAMDYWGQGTLVTVSS

SEQ ID NO: 3048 - protein, 120 aa, synthetic construct
QVQLQESGPGLVKPSQTLSLTCAVSGFSLTAYGVNWVRQPPGKGLEWLGMIWGDGNTDYNSALKSRLTISKDNSKSQVSLKLSSVTAADTAVYYCARDRVTATLYAMDYWGQGTLVTVSS

SEQ ID NO: 3049 - protein, 120 aa, synthetic construct
QVQLQESGPGLVKPSDTLSLTCTVSGFSLTAYGVNWVRQPPGKGLEWLGMIWGDGNTDYNSALKSRLTISKDNSKSQVSLKLSSVTAADTAVYYCARDRVTATLYAMDYWGQGTLVTVSS

SEQ ID NO: 3050 - protein, 120 aa, synthetic construct
QVQLQESGPGLVKPSQTLSLTCTVSGFSLTAYGVNWVRQHPGKGLEWLGMIWGDGNTDYNSALKSRLTISKDNSKSQVSLKLSSVTAADTAVYYCARDRVTATLYAMDYWGQGTLVTVSS

SEQ ID NO: 3051 - protein, 120 aa, synthetic construct
QVQLQESGPGLVKPSQTLSLTCTVSGFSLTAYGVNWVRQPAGKGLEWLGMIWGDGNTDYNSALKSRLTISKDNSKSQVSLKLSSVTAADTAVYYCARDRVTATLYAMDYWGQGTLVTVSS

SEQ ID NO: 3052 - protein, 120 aa, synthetic construct
QVQLQESGPGLVKPSQTLSLTCAVSGFSLTAYGVNWVRQPPGKGLEWLGMIWGDGNTDYNSALKSRLTISKDNSKSQVSLKLSSVTAVDTAVYYCARDRVTATLYAMDYWGQGTLVTVSS

SEQ ID NO: 3053 - protein, 120 aa, synthetic construct
QVQLQESGPGLVKPSETLSLTCTVSGFSLTAYGVNWVRQPPGKGLEWLGMIWGDGNTDYNSALKSRLTISKDNSKSHVSLKLSSVTAADTAVYYCARDRVTATLYAMDYWGQGTLVTVSS

SEQ ID NO: 3054 - protein, 120 aa, synthetic construct
QVQLQESGPGLVKPSETLSLTCAVSGFSLTAYGVNWVRQPPGKGLEWLGMIWGDGNTDYNSALKSRLTISKDNSKSQVSLKLSSVTAADTAVYYCARDRVTATLYAMDYWGQGTLVTVSS

SEQ ID NO: 3055 - protein, 120 aa, synthetic construct
QVQLQESGPGLVKPSQTLSLTCAVYGFSLTAYGVNWVRQPPGKGLEWLGMIWGDGNTDYNSALKSRLTISKDNSKSQVSLKLSSVTAADTAVYYCARDRVTATLYAMDYWGQGTLVTVSS

SEQ ID NO: 3056 - protein, 120 aa, synthetic construct
RVQLQESGPGLVKPSETLSLTCTVSGFSLTAYGVNWVRQPPGKGLEWLGMIWGDGNTDYNSALKSRLTISKDNSKSQVPLKLSSVTAADTAVYYCARDRVTATLYAMDYWGQGTLVTVSS

SEQ ID NO: 3057 - protein, 120 aa, synthetic construct
QVQLQESGPGLVKPSQTLSLTCTVSGFSLTAYGVNWVRQHPGKGLEWLGMIWGDGNTDYNSALKSLLTISKDNSKSQVSLKLSSVTAADTAVYYCARDRVTATLYAMDYWGQGTLVTVSS

SEQ ID NO: 3058 - protein, 120 aa, synthetic construct
QVQLQESGPGLVKPSDTLSLTCAVSGFSLTAYGVNWVRQPPGKGLEWLGMIWGDGNTDYNSALKSRLTISKDNSKSQVSLKLSSVTALDTAVYYCARDRVTATLYAMDYWGQGTLVTVSS

SEQ ID NO: 3059 - protein, 120 aa, synthetic construct
QVQLQESGPGLVKPSDTLSLTCAVSGFSLTAYGVNWVRQPPGKGLEWLGMIWGDGNTDYNSALKSRLTISKDNSKSQVSLKLSSVTAVDTAVYYCARDRVTATLYAMDYWGQGTLVTVSS

SEQ ID NO: 3060 - protein, 120 aa, synthetic construct
QVQLQESGSGLVKPSQTLSLTCAVSGFSLTAYGVNWVRQPPGKGLEWLGMIWGDGNTDYNSALKSRLTISKDNSKSQVSLKLSSVTAADTAVYYCARDRVTATLYAMDYWGQGTLVTVSS

SEQ ID NO: 3061 - protein, 120 aa, synthetic construct
EVQLVESGGGLVQPGRSLRLSCTVSGFSLTAYGVNWVRQAPGKGLEWLGMIWGDGNTDYNSALKSRLTISKDNSKSIVYLQMNSLKTEDTAVYYCARDRVTATLYAMDYWGQGTLVTVSS

SEQ ID NO: 3062 - protein, 120 aa, synthetic construct
EVQLVESGGGLVQPGPSLRLSCTVSGFSLTAYGVNWVRQAPGKGLEWLGMIWGDGNTDYNSALKSRLTISKDNSKSIVYLQMNSLKTEDTAVYYCARDRVTATLYAMDYWGQGTLVTVSS

SEQ ID NO: 3063 - protein, 120 aa, synthetic construct
QVQLQESGSGLVKPSQTLSLTCAVSGFSLTAYGVNWVRQSPGKGLEWLGMIWGDGNTDYNSALKSRLTISKDNSKSQVSLKLSSVTAADTAVYYCARDRVTATLYAMDYWGQGTLVTVSS

SEQ ID NO: 3064 - protein, 120 aa, synthetic construct
QVQLQESGPGLVKPSETLSLTCTVSGFSLTAYGVNWVRQPAGKGLEWLGMIWGDGNTDYNSALKSRLTISKDNSKSQVSLKLSSVTAADTAVYYCARDRVTATLYAMDYWGQGTLVTVSS

SEQ ID NO: 3065 - protein, 120 aa, synthetic construct
EVQLVESGGGLVKPGRSLRLSCTVSGFSLTAYGVNWVRQAPGKGLEWLGMIWGDGNTDYNSALKSRLTISKDNSKSIVYLQMNSLKTEDTAVYYCARDRVTATLYAMDYWGQGTLVTVSS

SEQ ID NO: 3066 - protein, 120 aa, synthetic construct
QVQLQESGPGLVKPSETLSLTCAVYGFSLTAYGVNWVRQPPGKGLEWLGMIWGDGNTDYNSALKSRLTISKDNSKSQVYLKLSSVTAADTAVYYCARDRVTATLYAMDYWGQGTLVTVSS

SEQ ID NO: 3067 - protein, 120 aa, synthetic construct
QVQLQESGPGLVKPSDTLSLTCAVSGFSLTAYGVNWVRQPPGKGLEWLGMIWGDGNTDYNSALKSRLTISKDNSKSQVSLKLSSVTAVDTGVYYCARDRVTATLYAMDYWGQGTLVTVSS

SEQ ID NO: 3068 - protein, 120 aa, synthetic construct
EVQLVESGGGLVQPGGSLRLSCAVSGFSLTAYGVNWVRQAPGKGLEWLGMIWGDGNTDYNSALKSRLTISKDNSKSSVYLQMNSLKTEDTAVYYCARDRVTATLYAMDYWGQGTLVTVSS

SEQ ID NO: 3069 - protein, 120 aa, synthetic construct
EVQLVESGGGLVKPGGSLRLSCAVSGFSLTAYGVNWVRQAPGKGLEWLGMIWGDGNTDYNSALKSRLTISKDNSKSTVYLQMNSLKTEDTAVYYCARDRVTATLYAMDYWGQGTLVTVSS

SEQ ID NO: 3070 - protein, 120 aa, synthetic construct
QVQLQQSGPGLVKPSQTLSLTCAVSGFSLTAYGVNWVRQSPSRGLEWLGMIWGDGNTDYNSALKSRLTINKDNSKSQVSLQLNSVTPEDTAVYYCARDRVTATLYAMDYWGQGTLVTVSS

SEQ ID NO: 3071 - protein, 120 aa, synthetic construct
QVQLVESGGGLVQPGGSLRLSCSVSGFSLTAYGVNWVRQAPGKGLEWLGMIWGDGNTDYNSALKSRLTISKDNSKSTVYLQMNSLRAEDTAVYYCARDRVTATLYAMDYWGQGTLVTVSS

SEQ ID NO: 3072 - protein, 120 aa, synthetic construct
QVQLQQWGAGLLKPSETLSLTCAVYGFSLTAYGVNWVRQPPGKGLEWLGMIWGDGNTDYNSALKSRLTISKDNSKSQVSLKLSSVTAADTAVYYCARDRVTATLYAMDYWGQGTLVTVSS

SEQ ID NO: 3073 - protein, 120 aa, synthetic construct
QVQLVESGGGVVQPGRSLRLSCAVSGFSLTAYGVNWVRQAPGKGLEWLGMIWGDGNTDYNSALKSRLTISKDNSTSTVFLQMNSLRAEDTAVYYCARDRVTATLYAMDYWGQGTLVTVSS

SEQ ID NO: 3074 - protein, 120 aa, synthetic construct
EVQLVESGGGLVQPGGSLRLSCAVSGFSLTAYGVNWVRQAPGKGLEWLGMIWGDGNTDYNSALKSRLTISKDNSKSTVYLQMNSLRAEDTAVYYCARDRVTATLYAMDYWGQGTLVTVSS

SEQ ID NO: 3075 - protein, 120 aa, synthetic construct
EVQLVESGGGLVQPGGSLRLSCAVSGFSLTAYGVNWVRQAPGKGLEWLGMIWGDGNTDYNSALKSRLTISKDNAKSSVYLQMNSLRDEDTAVYYCARDRVTATLYAMDYWGQGTLVTVSS

SEQ ID NO: 3076 - protein, 120 aa, synthetic construct
EVQLLESGGGLVQPGGSLRLSCAVSGFSLTAYGVNWVRQAPGKGLEWLGMIWGDGNTDYNSALKSRLTISKDNSKSTVYLQMNSLRAEDTAVYYCARDRVTATLYAMDYWGQGTLVTVSS

SEQ ID NO: 3077 - protein, 120 aa, synthetic construct
QVQLVESGGGLVKPGGSLRLSCAVSGFSLTAYGVNWVRQAPGKGLEWLGMIWGDGNTDYNSALKSRLTISKDNAKSSVYLQMNSLRAEDTAVYYCARDRVTATLYAMDYWGQGTLVTVSS

SEQ ID NO: 3078 - protein, 120 aa, synthetic construct
EVQLVESGGGLVQPGGSLKLSCAVSGFSLTAYGVNWVRQASGKGLEWLGMIWGDGNTDYNSALKSRLTISKDNSKSTVYLQMNSLKTEDTAVYYCARDRVTATLYAMDYWGQGTLVTVSS

SEQ ID NO: 3079 - protein, 120 aa, synthetic construct
QVQLLESGGGLVKPGGSLRLSCAVSGFSLTAYGVNWVRQAPGKGLEWLGMIWGDGNTDYNSALKSRLTISKDNAKSSVYLQMNSLRAEDTAVYYCARDRVTATLYAMDYWGQGTLVTVSS

SEQ ID NO: 3080 - protein, 120 aa, synthetic construct
QVQLVESGGGVVQPGRSLRLSCAVSGFSLTAYGVNWVRQAPGKGLEWLGMIWGDGNTDYNSALKSRLTISKDNSKSTVYLQMNSLRAEDTAVYYCARDRVTATLYAMDYWGQGTLVTVSS

SEQ ID NO: 3081 - protein, 120 aa, synthetic construct
QVQLVESGGGVVQPGRSLRLSCAVSGFSLTAYGVNWVRQAPGKGLEWLGMIWGDGNTDYNSALKSRLTISKDNSKSRVYLQMNSLRAEDTAVYYCARDRVTATLYAMDYWGQGTLVTVSS

SEQ ID NO: 3082 - protein, 120 aa, synthetic construct
QVQLVESGGGVVQPGRSLRLSCAVSGFSLTAYGVNWVRQAPGKGLEWLGMIWGDGNTDYNSALKSRLAISKDNSKSTVYLQMNSLRAEDTAVYYCARDRVTATLYAMDYWGQGTLVTVSS

SEQ ID NO: 3083 - protein, 120 aa, synthetic construct
QVQLVESGGGVVQPGGSLRLSCAVSGFSLTAYGVNWVRQAPGKGLEWLGMIWGDGNTDYNSALKSRLTISKDNSKSTVYLQMNSLRAEDTAVYYCARDRVTATLYAMDYWGQGTLVTVSS

SEQ ID NO: 3084 - protein, 120 aa, synthetic construct
EVQLVESGGGLVQPGGSLRLSCAVSGFSLTAYGVNWVRQAPGKGLEWLGMIWGDGNTDYNSALKSRLTISKDNAKSTVYLQMNSLRAEDTAVYYCARDRVTATLYAMDYWGQGTLVTVSS

SEQ ID NO: 3085 - protein, 120 aa, synthetic construct
EVQLVESGGGLVQPGGSLRLSCAVSGFSLTAYGVNWVRQAPGKGLEWLGMIWGDGNTDYNSALKSRLTISKDNAKSSVYLQMNSLRAEDTAVYYCARDRVTATLYAMDYWGQGTLVTVSS

SEQ ID NO: 3086 - protein, 120 aa, synthetic construct
EVQLVESGGVVVQPGGSLRLSCAVSGFSLTAYGVNWVRQAPGKGLEWLGMIWGDGNTDYNSALKSRLTISKDNSKSSVYLQMNSLRTEDTALYYCARDRVTATLYAMDYWGQGTLVTVSS

SEQ ID NO: 3087 - protein, 120 aa, synthetic construct
EVQLVESGGGLVQPGGSLRLSCAVSGFSLTAYGVNWVRQAPGKGLEWLGMIWGDGNTDYNSALKSRLTISKHNSKSTVYLQMNSLRAEDTAVYYCARDRVTATLYAMDYWGQGTLVTVSS

SEQ ID NO: 3088 - protein, 120 aa, synthetic construct
EVQLVESGGGLVKPGGSLRLSCAVSGFSLTAYGVNWVRQAPGKGLEWLGMIWGDGNTDYNSALKSRLTISKDNAKSSVYLQMNSLRAEDTAVYYCARDRVTATLYAMDYWGQGTLVTVSS

SEQ ID NO: 3089 - protein, 120 aa, synthetic construct
EVQLVESGGGLIQPGGSLRLSCAVSGFSLTAYGVNWVRQPPGKGLEWLGMIWGDGNTDYNSALKSRLTISKDNSKSTVYLQMNSLRAEDTAVYYCARDRVTATLYAMDYWGQGTLVTVSS

SEQ ID NO: 3090 - skipped

SEQ ID NO: 3091 - protein, 119 aa, synthetic construct
QVQLQQSGPELVKPGASVKISCKASGYAFSSSWMNWVKQRPGQGLEWIGRIYPGDGDTKYNGKFKGKATLTADKSSSTAYMHLSSLTSVDSAVYFCARRGTGGWYFDVWGAGTTVTVSS

SEQ ID NO: 3092 - protein, 111 aa, synthetic construct
DIVLTQSPASLAVSLGQRATISCRASESVDSSGNSFMHWYQQKPGQPPQLLIYRASNLESGIPARFSGSGSRTDFTLTINPVEADDVATFYCQQSFDDPFTFGSGTKLEIK

SEQ ID NO: 3093 - protein, 111 aa, synthetic construct
DIVLTQSPDSLAVSLGERATINCRASESVDSSGNSFMHWYQQKPGQPPQLLIYRASNLESGVPDRFSGSGSRTDFTLTISSLQAEDVAVYYCQQSFDDPFTFGQGTKLEIK

SEQ ID NO: 3094 - protein, 111 aa, synthetic construct
EIVLTQSPATLSLSPGERATLSCRASESVDSSGNSFMHWYQQKPGQAPQLLIYRASNLESGIPARFSGSGSRTDFTLTISSLEPEDFAVYYCQQSFDDPFTFGQGTKLEIK

SEQ ID NO: 3095 - protein, 111 aa, synthetic construct
EIVLTQSPATLSLSPGERATLSCRASESVDSSGNSFMHWYQQKPGQAPQLLIYRASNLESGIPARFSGSGSRTDFTLTISRLEPEDFAVYYCQQSFDDPFTFGQGTKLEIK

SEQ ID NO: 3096 - protein, 111 aa, synthetic construct
EIVLTQSPATLSLSPGERATLSCRASESVDSSGNSFMHWYQQKPGQAPQLLIYRASNLESGIPARFSGSGSRTDFTLTISSLQPEDFAVYYCQQSFDDPFTFGQGTKLEIK

SEQ ID NO: 3097 - protein, 111 aa, synthetic construct
DIQLTQSPSSLSASVGDRVTITCRASESVDSSGNSFMHWYQQKPGQAPQLLIYRASNLESGVPSRFSGSGSRTDFTLTISSLQPEDVATYYCQQSFDDPFTFGQGTKLEIK

SEQ ID NO: 3098 - protein, 111 aa, synthetic construct
EIVLTQSPATLSLSPGERATLSCRASESVDSSGNSFMHWYQQKPGQAPQLLIYRASNLESGIPARFSGSGPRTDFTLTISSLEPEDFAVYYCQQSFDDPFTFGQGTKLEIK

SEQ ID NO: 3099 - protein, 111 aa, synthetic construct
EIVLTQSPATLSLSPGERATLSCRASESVDSSGNSFMHWYQQKPGQAPQLLIYRASNLESGIPDRFSGSGSRTDFTLTISRLEPEDFAVYYCQQSFDDPFTFGQGTKLEIK

SEQ ID NO: 3100 - protein, 111 aa, synthetic construct
DIQLTQSPSSLSASVGDRVTITCRASESVDSSGNSFMHWYQQKPGKVPQLLIYRASNLESGVPSRFSGSGSRTDFTLTISSLQPEDVATYYCQQSFDDPFTFGQGTKLEIK

SEQ ID NO: 3101 - protein, 111 aa, synthetic construct
DIQLTQSPSSLSASVGDRVTITCRASESVDSSGNSFMHWYQQKPGKTPQLLIYRASNLESGIPSRFSGSGSRTDFTLTIRSLQPEDFATYYCQQSFDDPFTFGQGTKLEIK

SEQ ID NO: 3102 - protein, 111 aa, synthetic construct
EIVLTQSPGTLSLSPGERATLSCRASESVDSSGNSFMHWYQQKPGQAPQLLIYRASNLESGIPDRFSGSGSRTDFTLTISRLEPEDFAVYYCQQSFDDPFTFGQGTKLEIK

SEQ ID NO: 3103 - protein, 111 aa, synthetic construct
EIVLTQSPATLSLSPGERATLSCRASESVDSSGNSFMHWYQQKPGLAPQLLIYRASNLESGIPDRFSGSGSRTDFTLTISRLEPEDFAVYYCQQSFDDPFTFGQGTKLEIK

SEQ ID NO: 3104 - protein, 111 aa, synthetic construct
DIQLTQSPSSLSASVGDRVTITCRASESVDSSGNSFMHWYQQKPGKAPQLLIYRASNLESGVPSRFSGSGSRTDFTLTISSLQPEDFATYYCQQSFDDPFTFGQGTKLEIK

SEQ ID NO: 3105 - protein, 111 aa, synthetic construct
DIQLTQSPSSVSASVGDRVTITCRASESVDSSGNSFMHWYQQKPGKAPQLLIYRASNLESGVPSRFSGSGSRTDFTLTISSLQPEDFATYYCQQSFDDPFTFGQGTKLEIK

SEQ ID NO: 3106 - protein, 111 aa, synthetic construct
AIQLTQSPSSLSASVGDRVTITCRASESVDSSGNSFMHWYQQKPGKAPQLLIYRASNLESGVPSRFSGSGSRTDFTLTISSLQPEDFATYYCQQSFDDPFTFGQGTKLEIK

SEQ ID NO: 3107 - protein, 111 aa, synthetic construct
DIQLTQSPSFLSASVGDRVTITCRASESVDSSGNSFMHWYQQKPGKAPQLLIYRASNLESGVPSRFSGSGSRTEFTLTISSLQPEDFATYYCQQSFDDPFTFGQGTKLEIK

SEQ ID NO: 3108 - protein, 111 aa, synthetic construct
DIQLTQSPSSLSASVGDRVTITCRASESVDSSGNSFMHWYQQKPGKAPQLLIYRASNLESGVPSRFSGSGSRTDFTFTISSLQPEDIATYYCQQSFDDPFTFGQGTKLEIK

SEQ ID NO: 3109 - protein, 111 aa, synthetic construct
EIVLTQSPATLSVSPGERATLSCRASESVDSSGNSFMHWYQQKPGQAPQLLIYRASNLESGIPARFSGSGSRTEFTLTISILQSEDFAVYYCQQSFDDPFTFGQGTKLEIK

SEQ ID NO: 3110 - protein, 111 aa, synthetic construct
EIVLTQSPATLSVSPGERATLSCRASESVDSSGNSFMHWYQQKPGQAPQLLIYRASNLESGIPARFSGSGSRTEFTLTISSLQSEDFAVYYCQQSFDDPFTFGQGTKLEIK

SEQ ID NO: 3111 - protein, 111 aa, synthetic construct
AIRLTQSPFSLSASVGDRVTITCRASESVDSSGNSFMHWYQQKPAKAPQLFIYRASNLESGVPSRFSGSGSRTDFTLTISSLQPEDFATYYCQQSFDDPFTFGQGTKLEIK

SEQ ID NO: 3112 - protein, 111 aa, synthetic construct
DIQLTQSPSSLSASVGDRVTITCRASESVDSSGNSFMHWYQQKPGKAPQSLIYRASNLESGVPSRFSGSGSRTDFTLTISSLQPEDFATYYCQQSFDDPFTFGQGTKLEIK

SEQ ID NO: 3113 - protein, 111 aa, synthetic construct
DIQLTQSPSSLSASVGDRVTITCRASESVDSSGNSFMHWYQQKPGKAPQRLIYRASNLESGVPSRFSGSGSRTEFTLTISNLQPEDFATYYCQQSFDDPFTFGQGTKLEIK

SEQ ID NO: 3114 - protein, 111 aa, synthetic construct
DIQLTQSPSTLSASVGDRVTITCRASESVDSSGNSFMHWYQQKPGKAPQLLIYRASNLESGVPSRFSGSGSRTEFTLTISSLQPDDFATYYCQQSFDDPFTFGQGTKLEIK

SEQ ID NO: 3115 - protein, 111 aa, synthetic construct
EIVLTQSPDFQSVTPKEKVTITCRASESVDSSGNSFMHWYQQKPDQSPQLLIYRASNLESGVPSRFSGSGSRTDFTLTINSLEAEDAATYYCQQSFDDPFTFGQGTKLEIK

SEQ ID NO: 3116 - protein, 111 aa, synthetic construct
DIQLTQSPSSLSASVGDRVTITCRASESVDSSGNSFMHWYQQKPGKAPQSLIYRASNLESGVPSKFSGSGSRTDFTLTISSLQPEDFATYYCQQSFDDPFTFGQGTKLEIK

SEQ ID NO: 3117 - protein, 111 aa, synthetic construct
DIQLTQSPSSLSASVGDRVTITCRASESVDSSGNSFMHWYQQKPGKAPQRLIYRASNLESGVPSRFSGSGSRTEFTLTISSLQPEDFATYYCQQSFDDPFTFGQGTKLEIK

SEQ ID NO: 3118 - protein, 111 aa, synthetic construct
DIVLTQTPLSLSVTPGQPASISCRASESVDSSGNSFMHWYLQKPGQPPQLLIYRASNLESGVPDRFSGSGSRTDFTLKISRVEAEDVGVYYCQQSFDDPFTFGQGTKLEIK

SEQ ID NO: 3119 - protein, 111 aa, synthetic construct
DIQLTQSPSSLSASVGDRVTITCRASESVDSSGNSFMHWYQQKPEKAPQSLIYRASNLESGVPSRFSGSGSRTDFTLTISSLQPEDFATYYCQQSFDDPFTFGQGTKLEIK

SEQ ID NO: 3120 - protein, 111 aa, synthetic construct
EIVLTQSPPTLSLSPGERVTLSCRASESVDSSGNSFMHWYQQKPGQAPQLLIYRASNLESGIPARFSGSGSRTDFTLTISSLQPEDFAVYYCQQSFDDPFTFGQGTKLEIK

SEQ ID NO: 3121 - protein, 111 aa, synthetic construct
DIQLTQSPSAMSASVGDRVTITCRASESVDSSGNSFMHWYQQKPGKVPQRLIYRASNLESGVPSRFSGSGSRTEFTLTISSLQPEDFATYYCQQSFDDPFTFGQGTKLEIK

SEQ ID NO: 3122 - protein, 111 aa, synthetic construct
DIVLTQSPLSLPVTPGEPASISCRASESVDSSGNSFMHWYLQKPGQSPQLLIYRASNLESGVPDRFSGSGSRTDFTLKISRVEAEDVGVYYCQQSFDDPFTFGQGTKLEIK

SEQ ID NO: 3123 - protein, 111 aa, synthetic construct
DIVLTQTPLSLPVTPGEPASISCRASESVDSSGNSFMHWYLQKPGQSPQLLIYRASNLESGVPDRFSGSGSRTDFTLKISRVEAEDVGVYYCQQSFDDPFTFGQGTKLEIK

SEQ ID NO: 3124 - protein, 111 aa, synthetic construct
DIVLTQTPLSLSVTPGQPASISCRASESVDSSGNSFMHWYLQKPGQSPQLLIYRASNLESGVPDRFSGSGSRTDFTLKISRVEAEDVGVYYCQQSFDDPFTFGQGTKLEIK

SEQ ID NO: 3125 - protein, 111 aa, synthetic construct
EIVLTQSPPTLSLSPGERVTLSCRASESVDSSGNSFMHWYQQKPGQAPQLLIYRASNLESSIPARFSGSGSRTDFTLTISSLQPEDFAVYYCQQSFDDPFTFGQGTKLEIK

SEQ ID NO: 3126 - protein, 111 aa, synthetic construct
DIVLTQSPLSLPVTLGQPASISCRASESVDSSGNSFMHWYQQRPGQSPQRLIYRASNLESGVPDRFSGSGSRTDFTLKISRVEAEDVGVYYCQQSFDDPFTFGQGTKLEIK

SEQ ID NO: 3127 - protein, 111 aa, synthetic construct
DIVLTQTPLSSPVTLGQPASISCRASESVDSSGNSFMHWYQQRPGQPPQLLIYRASNLESGVPDRFSGSGARTDFTLKISRVEAEDVGVYYCQQSFDDPFTFGQGTKLEIK

SEQ ID NO: 3128 - protein, 111 aa, synthetic construct
DIVLTQSPAFLSVTPGEKVTITCRASESVDSSGNSFMHWYQQKPDQAPQLLIYRASNLESGVPSRFSGSGSRTDFTFTISSLEAEDAATYYCQQSFDDPFTFGQGTKLEIK

SEQ ID NO: 3129 - protein, 111 aa, synthetic construct
DIQLIQSPSFLSASVGDRVSIICRASESVDSSGNSFMHWYLQKPGKSPQLFIYRASNLESGVSSRFSGRGSRTDFTLTIISLKPEDFAAYYCQQSFDDPFTFGQGTKLEIK

SEQ ID NO: 3130 - protein, 111 aa, synthetic construct
EIVLTQTPLSLSITPGEQASISCRASESVDSSGNSFMHWYLQKARPVPQLLIYRASNLESGVPDRFSGSGSRTDFTLKISRVEAEDFGVYYCQQSFDDPFTFGQGTKLEIK

SEQ ID NO: 3131 - protein, 111 aa, synthetic construct
EIVLTQTPLSLSITPGEQASMSCRASESVDSSGNSFMHWYLQKARPVPQLLIYRASNLESGVPDRFSGSGSRTDFTLKISRVEAEDFGVYYCQQSFDDPFTFGQGTKLEIK

SEQ ID NO: 3132 - protein, 111 aa, synthetic construct
EITLTQSPAFMSATPGDKVNISCRASESVDSSGNSFMHWYQQKPGEAPQFIIYRASNLESGIPPRFSGSGYRTDFTLTINNIESEDAAYYYCQQSFDDPFTFGQGTKLEIK

SEQ ID NO: 3133 - protein, 119 aa, synthetic construct
QVQLVQSGAEVKKPGASVKVSCKASGYAFSSSWMNWVRQAPGQGLEWIGRIYPGDGDTKYNGKFKGRATLTADKSTSTAYMELSSLRSEDTAVYYCARRGTGGWYFDVWGQGTTVTVSS

SEQ ID NO: 3134 - protein, 119 aa, synthetic construct
QVQLVQSGAEVKKPGSSVKVSCKASGYAFSSSWMNWVRQAPGQGLEWIGRIYPGDGDTKYNGKFKGRATLTADKSTSTAYMELSSLRSEDTAVYYCARRGTGGWYFDVWGQGTTVTVSS

SEQ ID NO: 3135 - protein, 119 aa, synthetic construct
QVQLVQSGAEVKKPGASVKVSCKASGYAFSSSWMNWVRQAPGKGLEWIGRIYPGDGDTKYNGKFKGRATLTADKSTSTAYMELSSLRSEDTAVYYCARRGTGGWYFDVWGQGTTVTVSS

SEQ ID NO: 3136 - protein, 119 aa, synthetic construct
QVQLVQSGAEVKKPGASVKVSCKASGYAFSSSWMNWVRQAPGQELEWIGRIYPGDGDTKYNGKFKGRATLTADKSISTAYMELSSLRSEDTATYYCARRGTGGWYFDVWGQGTTVTVSS

SEQ ID NO: 3137 - protein, 119 aa, synthetic construct
EVQLVQSGAEVKKPGATVKISCKASGYAFSSSWMNWVQQAPGKGLEWIGRIYPGDGDTKYNGKFKGRATLTADKSTSTAYMELSSLRSEDTAVYYCARRGTGGWYFDVWGQGTTVTVSS

SEQ ID NO: 3138 - protein, 119 aa, synthetic construct
QVQLVQSGAEVKKTGSSVKVSCKASGYAFSSSWMNWVRQAPGQALEWIGRIYPGDGDTKYNGKFKGRATLTADKSMSTAYMELSSLRSEDTAMYYCARRGTGGWYFDVWGQGTTVTVSS

SEQ ID NO: 3139 - protein, 119 aa, synthetic construct
QVQLVQSGAEVKKPGASVKVSCKASGYAFSSSWMNWVRQAPGQRLEWIGRIYPGDGDTKYNGKFKGRATLTADKSASTAYMELSSLRSEDMAVYYCARRGTGGWYFDVWGQGTTVTVSS

SEQ ID NO: 3140 - protein, 119 aa, synthetic construct
QVQLVQSGAEVKKPGASVKVSCKASGYAFSSSWMNWVRQAPGQGLEWIGRIYPGDGDTKYNGKFKGRATLTADKSTSTAYMELRSLRSDDMAVYYCARRGTGGWYFDVWGQGTTVTVSS

SEQ ID NO: 3141 - protein, 119 aa, synthetic construct
QVQLVQSGAEVKKPGASVKVSCKASGYAFSSSWMNWVRQAPGQRLEWIGRIYPGDGDTKYNGKFKGRATLTADKSASTAYMELSSLRSEDTAVYYCARRGTGGWYFDVWGQGTTVTVSS

SEQ ID NO: 3142 - protein, 119 aa, synthetic construct
QVQLVQSGAEVKKPGASVKVSCKASGYAFSSSWMNWVRQAPGQGLEWIGRIYPGDGDTKYNGKFKGRATLTADKSTSTAYMELRSLRSDDTAVYYCARRGTGGWYFDVWGQGTTVTVSS

SEQ ID NO: 3143 - protein, 119 aa, synthetic construct
QVQLVQSGAEVKKPGASVKVSCKASGYAFSSSWMNWVRQAPGQGLEWIGRIYPGDGDTKYNGKFKGRATLTADKSISTAYMELSRLRSDDTAVYYCARRGTGGWYFDVWGQGTTVTVSS

SEQ ID NO: 3144 - protein, 119 aa, synthetic construct
QVQLVQSGAEVKKPGASVKVSCKASGYAFSSSWMNWVRQAPGQGLEWIGRIYPGDGDTKYNGKFKGRATLTADKSISTAYMELSRLRSDDTVVYYCARRGTGGWYFDVWGQGTTVTVSS

SEQ ID NO: 3145 - protein, 119 aa, synthetic construct
QVQLVQSGAEVKKPGASVKVSCKASGYAFSSSWMNWVRQAPGQGLEWIGRIYPGDGDTKYNGKFKGWATLTADKSISTAYMELSRLRSDDTAVYYCARRGTGGWYFDVWGQGTTVTVSS

SEQ ID NO: 3146 - protein, 119 aa, synthetic construct
QVQLVQSGAEVKKPGASVKVSCKASGYAFSSSWMNWVRQATGQGLEWIGRIYPGDGDTKYNGKFKGRATLTANKSISTAYMELSSLRSEDTAVYYCARRGTGGWYFDVWGQGTTVTVSS

SEQ ID NO: 3147 - protein, 119 aa, synthetic construct
QVQLVQSGSELKKPGASVKVSCKASGYAFSSSWMNWVRQAPGQGLEWIGRIYPGDGDTKYNGKFKGRAVLSADKSVSTAYLQISSLKAEDTAVYYCARRGTGGWYFDVWGQGTTVTVSS

SEQ ID NO: 3148 - protein, 119 aa, synthetic construct
QVQLVQSGPEVKKPGTSVKVSCKASGYAFSSSWMNWVRQARGQRLEWIGRIYPGDGDTKYNGKFKGRATLTADKSTSTAYMELSSLRSEDTAVYYCARRGTGGWYFDVWGQGTTVTVSS

SEQ ID NO: 3149 - protein, 119 aa, synthetic construct
EVQLVQSGAEVKKPGESLKISCKASGYAFSSSWMNWVRQMPGKGLEWIGRIYPGDGDTKYNGKFKGQATLSADKSISTAYLQWSSLKASDTAMYYCARRGTGGWYFDVWGQGTTVTVSS

SEQ ID NO: 3150 - protein, 119 aa, synthetic construct
QVQLVQSGSELKKPGASVKVSCKASGYAFSSSWMNWVRQAPGQGLEWIGRIYPGDGDTKYNGKFKGRAVLSADKSVSMAYLQISSLKAEDTAVYYCARRGTGGWYFDVWGQGTTVTVSS

SEQ ID NO: 3151 - protein, 119 aa, synthetic construct
QVQLVQSGHEVKQPGASVKVSCKASGYAFSSSWMNWVPQAPGQGLEWIGRIYPGDGDTKYNGKFKGRAVLSADKSASTAYLQISSLKAEDMAMYYCARRGTGGWYFDVWGQGTTVTVSS

SEQ ID NO: 3152 - protein, 119 aa, synthetic construct
EVQLVQSGAEVKKPGESLKISCKASGYAFSSSWMNWVRQMPGKGLEWIGRIYPGDGDTKYNGKFKGQATLSADKPISTAYLQWSSLKASDTAMYYCARRGTGGWYFDVWGQGTTVTVSS

SEQ ID NO: 3153 - protein, 119 aa, synthetic construct
EVQLVQSGAEVKKPGESLRISCKASGYAFSSSWMNWVRQMPGKGLEWIGRIYPGDGDTKYNGKFKGQATLSADKSISTAYLQWSSLKASDTAMYYCARRGTGGWYFDVWGQGTTVTVSS

SEQ ID NO: 3154 - protein, 119 aa, synthetic construct
EVQLVQSGAEVKKPGESLRISCKASGYAFSSSWMNWVRQMPGKGLEWIGRIYPGDGDTKYNGKFKGHATLSADKSISTAYLQWSSLKASDTAMYYCARRGTGGWYFDVWGQGTTVTVSS

SEQ ID NO: 3155 - protein, 119 aa, synthetic construct
QVQLVQSGAEVKKTGSSVKVSCKASGYAFSSSWMNWVRQAPRQALEWIGRIYPGDGDTKYNGKFKGRATLTADKSMSTAYMELSSLRSEDTAMYYCARRGTGGWYFDVWGQGTTVTVSS

SEQ ID NO: 3156 - protein, 119 aa, synthetic construct
EVQLVESGGGLVQPGRSLRLSCTASGYAFSSSWMNWVRQAPGKGLEWIGRIYPGDGDTKYNGKFKGRATLSADKSKSIAYLQMNSLKTEDTAVYYCARRGTGGWYFDVWGQGTTVTVSS

SEQ ID NO: 3157 - protein, 119 aa, synthetic construct
EVQLVESGGGLVQPGPSLRLSCTASGYAFSSSWMNWVRQAPGKGLEWIGRIYPGDGDTKYNGKFKGRATLSADKSKSIAYLQMNSLKTEDTAVYYCARRGTGGWYFDVWGQGTTVTVSS

SEQ ID NO: 3158 - protein, 119 aa, synthetic construct
QVQLQESGPGLVKPSQTLSLTCTASGYAFSSSWMNWVRQPPGKGLEWIGRIYPGDGDTKYNGKFKGRATLSADKSKSQASLKLSSVTAADTAVYYCARRGTGGWYFDVWGQGTTVTVSS

SEQ ID NO: 3159 - protein, 119 aa, synthetic construct
QVQLQESGPGLVKPSGTLSLTCAASGYAFSSSWMNWVRQPPGKGLEWIGRIYPGDGDTKYNGKFKGRATLSADKSKSQASLKLSSVTAADTAVYYCARRGTGGWYFDVWGQGTTVTVSS

SEQ ID NO: 3160 - protein, 119 aa, synthetic construct
EVQLVESGGGLVKPGRSLRLSCTASGYAFSSSWMNWVRQAPGKGLEWIGRIYPGDGDTKYNGKFKGRATLSADKSKSIAYLQMNSLKTEDTAVYYCARRGTGGWYFDVWGQGTTVTVSS

SEQ ID NO: 3161 - protein, 119 aa, synthetic construct
EVQLVESGGGLVQPGGSLKLSCAASGYAFSSSWMNWVRQASGKGLEWIGRIYPGDGDTKYNGKFKGRATLSADKSKSTAYLQMNSLKTEDTAVYYCARRGTGGWYFDVWGQGTTVTVSS

SEQ ID NO: 3162 - protein, 119 aa, synthetic construct
QVQLQESGPGLVKPSQTLSLTCAASGYAFSSSWMNWVRQPPGKGLEWIGRIYPGDGDTKYNGKFKGRATLSADKSKSQASLKLSSVTAADTAVYYCARRGTGGWYFDVWGQGTTVTVSS

SEQ ID NO: 3163 - protein, 119 aa, synthetic construct
EVQLVESGGGLVKPGGSLRLSCAASGYAFSSSWMNWVRQAPGKGLEWIGRIYPGDGDTKYNGKFKGRATLSADKSKSTAYLQMNSLKTEDTAVYYCARRGTGGWYFDVWGQGTTVTVSS

SEQ ID NO: 3164 - protein, 119 aa, synthetic construct
EVQLVESGGALVKPGGSLRLSCAASGYAFSSSWMNWVRQAPGKGLEWIGRIYPGDGDTKYNGKFKGRATLSADKSKSTAYLQMNSLKTEDTAVYYCARRGTGGWYFDVWGQGTTVTVSS

SEQ ID NO: 3165 - protein, 119 aa, synthetic construct
QVQLQESGPGLVKPSQTLSLTCAAYGYAFSSSWMNWVRQPPGKGLEWIGRIYPGDGDTKYNGKFKGRATLSADKSKSQASLKLSSVTAADTAVYYCARRGTGGWYFDVWGQGTTVTVSS

SEQ ID NO: 3166 - protein, 119 aa, synthetic construct
QVQLQESGSGLVKPSQTLSLTCAASGYAFSSSWMNWVRQPPGKGLEWIGRIYPGDGDTKYNGKFKGRATLSADKSKSQASLKLSSVTAADTAVYYCARRGTGGWYFDVWGQGTTVTVSS

SEQ ID NO: 3167 - protein, 119 aa, synthetic construct
EVQLVESGGGLVQPGGSLRLSCAASGYAFSSSWMNWVRQAPGKGLEWIGRIYPGDGDTKYNGKFKGRATLSADKSKSSAYLQMNSLKTEDTAVYYCARRGTGGWYFDVWGQGTTVTVSS

SEQ ID NO: 3168 - protein, 119 aa, synthetic construct
QVQLQESGPGLVKPSDTLSLTCTASGYAFSSSWMNWVRQPPGKGLEWIGRIYPGDGDTKYNGKFKGRATLSADKSKSQASLKLSSVTAADTAVYYCARRGTGGWYFDVWGQGTTVTVSS

SEQ ID NO: 3169 - protein, 119 aa, synthetic construct
QVQLQESGPGLVKPSQTLSLTCTASGYAFSSSWMNWVRQHPGKGLEWIGRIYPGDGDTKYNGKFKGRATLSADKSKSQASLKLSSVTAADTAVYYCARRGTGGWYFDVWGQGTTVTVSS

SEQ ID NO: 3170 - protein, 119 aa, synthetic construct
QVQLQESGPGLVKPSQTLSLTCTASGYAFSSSWMNWVRQHPGKGLEWIGRIYPGDGDTKYNGKFKGLATLSADKSKSQASLKLSSVTAADTAVYYCARRGTGGWYFDVWGQGTTVTVSS

SEQ ID NO: 3171 - protein, 119 aa, synthetic construct
QVQLVESGGGVVQPGRSLRLSCAASGYAFSSSWMNWVRQAPGKGLEWIGRIYPGDGDTKYNGKFKGRATLSADKSKSTAYLQMSSLRAEDTAVYYCARRGTGGWYFDVWGQGTTVTVSS

SEQ ID NO: 3172 - protein, 119 aa, synthetic construct
QVQLVESGGGLVKPGGSLRLSCAASGYAFSSSWMNWVRQAPGKGLEWIGRIYPGDGDTKYNGKFKGRATLSADKAKSSAYLQMNSLRAEDTAVYYCARRGTGGWYFDVWGQGTTVTVSS

SEQ ID NO: 3173 - protein, 119 aa, synthetic construct
QVQLVESGGGLVQPGGSLRLSCSASGYAFSSSWMNWVRQAPGKGLEWIGRIYPGDGDTKYNGKFKGRATLSADKSKSTAYLQMNSLRAEDTAVYYCARRGTGGWYFDVWGQGTTVTVSS

SEQ ID NO: 3174 - protein, 119 aa, synthetic construct
QVQLLESGGGLVKPGGSLRLSCAASGYAFSSSWMNWVRQAPGKGLEWIGRIYPGDGDTKYNGKFKGRATLSADKAKSSAYLQMNSLRAEDTAVYYCARRGTGGWYFDVWGQGTTVTVSS

SEQ ID NO: 3175 - protein, 119 aa, synthetic construct
EVQLVESGGGLVQPGGSLRLSCSASGYAFSSSWMNWVRQAPGKGLEWIGRIYPGDGDTKYNGKFKGRATLSADKSKSTAYLQMSSLRAEDTAVYYCARRGTGGWYFDVWGQGTTVTVSS

SEQ ID NO: 3176 - protein, 119 aa, synthetic construct
QVQLQESGPGLVKPSDTLSLTCAASGYAFSSSWMNWVRQPPGKGLEWIGRIYPGDGDTKYNGKFKGRATLSADKSKSQASLKLSSVTAVDTAVYYCARRGTGGWYFDVWGQGTTVTVSS

SEQ ID NO: 3177 - protein, 119 aa, synthetic construct
QVQLQESGPGLVKPSQTLSLTCAASGYAFSSSWMNWVRQPPGKGLEWIGRIYPGDGDTKYNGKFKGRATLSADKSKSQASLKLSSVTAVDTAVYYCARRGTGGWYFDVWGQGTTVTVSS

SEQ ID NO: 3178 - protein, 119 aa, synthetic construct
EVQLVESGGGLVQPGGSLRLSCSASGYAFSSSWMNWVRQAPGKGLEWIGRIYPGDGDTKYNGKFKGRATLSADKSKSTAYVQMSSLRAEDTAVYYCARRGTGGWYFDVWGQGTTVTVSS

SEQ ID NO: 3179 - protein, 119 aa, synthetic construct
QVQLVDSGGGVVQPGRSLRLSCAASGYAFSSSWMNWVRQAPGKGLEWIGRIYPGDGDTKYNGKFKGRATLSADKSKSTAYLQMNSLRAEDTAVYYCARRGTGGWYFDVWGQGTTVTVSS

SEQ ID NO: 3180 - protein, 119 aa, synthetic construct
QVQLVESGGGVVQPGRSLRLSCAASGYAFSSSWMNWVRQAPGKGLEWIGRIYPGDGDTKYNGKFKGRATLSADKSKSTAYLQMNSLRAEGTAVYYCARRGTGGWYFDVWGQGTTVTVSS

SEQ ID NO: 3181 - protein, 119 aa, synthetic construct
QVQLVESGGGVVQPGRSLRLSCAASGYAFSSSWMNWVRQAPGKGLEWIGRIYPGDGDTKYNGKFKGRATLSADKSKSTAYLQMNSLRAEDTAVYYCARRGTGGWYFDVWGQGTTVTVSS

SEQ ID NO: 3182 - protein, 119 aa, synthetic construct
EVQLVESGGGLVQPGGSLRLSCAASGYAFSSSWMNWVRQAPGKGLEWIGRIYPGDGDTKYNGKFKGRATLSADKSKSTAYLQMNSLRAEDTAVYYCARRGTGGWYFDVWGQGTTVTVSS

SEQ ID NO: 3183 - protein, 117 aa, synthetic construct
EVQLVESGGDLVKPGGSLKLSCAVSGFTFRSYGMSWVRQTPDKRLEWVALISSGGSYTYYTDSVKGRFTISRDNAKNTLYLQMSSLKSEDTAIYYCSRHGGNFFDYWGQGTTLTVSS

SEQ ID NO: 3184 - protein, 107 aa, synthetic construct
QIVLTQSPSIMSASPGEKVTMTCSVSSSVSYMHWYQQKSGTSPKRWIYDTSKLASGVPARFSGSGSGTSYSLTISSMEAEDAATYYCQQWSSNPQYTFGGGTKLEIK

SEQ ID NO: 3185 - protein, 107 aa, synthetic construct
DIVLTQSPAFLSVTPGEKVTITCSVSSSVSYMHWYQQKPDQAPKLLIYDTSKLASGVPSRFSGSGSGTDYTFTISSLEAEDAATYYCQQWSSNPQYTFGQGTKLEIK

SEQ ID NO: 3186 - protein, 107 aa, synthetic construct
AIQLTQSPSSLSASVGDRVTITCSVSSSVSYMHWYQQKPGKAPKLLIYDTSKLASGVPSRFSGSGSGTDYTLTISSLQPEDFATYYCQQWSSNPQYTFGQGTKLEIK

SEQ ID NO: 3187 - protein, 107 aa, synthetic construct
DIQLTQSPSFLSASVGDRVTITCSVSSSVSYMHWYQQKPGKAPKLLIYDTSKLASGVPSRFSGSGSGTEYTLTISSLQPEDFATYYCQQWSSNPQYTFGQGTKLEIK

SEQ ID NO: 3188 - protein, 107 aa, synthetic construct
DIQLTQSPSSLSASVGDRVTITCSVSSSVSYMHWYQQKPGKAPKLLIYDTSKLASGVPSRFSGSGSGTDYTLTISSLQPEDFATYYCQQWSSNPQYTFGQGTKLEIK

SEQ ID NO: 3189 - protein, 107 aa, synthetic construct
DIQLTQSPSSVSASVGDRVTITCSVSSSVSYMHWYQQKPGKAPKLLIYDTSKLASGVPSRFSGSGSGTDYTLTISSLQPEDFATYYCQQWSSNPQYTFGQGTKLEIK

SEQ ID NO: 3190 - protein, 107 aa, synthetic construct
DIQLTQSPSSLSASVGDRVTITCSVSSSVSYMHWYQQKPGKVPKLLIYDTSKLASGVPSRFSGSGSGTDYTLTISSLQPEDVATYYCQQWSSNPQYTFGQGTKLEIK

SEQ ID NO: 3191 - protein, 107 aa, synthetic construct
DIQLTQSPSSLSASVGDRVTITCSVSSSVSYMHWYQQKPGQAPKLLIYDTSKLASGVPSRFSGSGSGTDYTLTISSLQPEDVATYYCQQWSSNPQYTFGQGTKLEIK

SEQ ID NO: 3192 - protein, 107 aa, synthetic construct
EIVLTQSPDFQSVTPKEKVTITCSVSSSVSYMHWYQQKPDQSPKLLIYDTSKLASGVPSRFSGSGSGTDYTLTINSLEAEDAATYYCQQWSSNPQYTFGQGTKLEIK

SEQ ID NO: 3193 - protein, 107 aa, synthetic construct
AIRLTQSPFSLSASVGDRVTITCSVSSSVSYMHWYQQKPAKAPKLFIYDTSKLASGVPSRFSGSGSGTDYTLTISSLQPEDFATYYCQQWSSNPQYTFGQGTKLEIK

SEQ ID NO: 3194 - protein, 107 aa, synthetic construct
DIQLTQSPSSLSASVGDRVTITCSVSSSVSYMHWYQQKPGKAPKLLIYDTSKLASGVPSRFSGSGSGTDYTFTISSLQPEDIATYYCQQWSSNPQYTFGQGTKLEIK

SEQ ID NO: 3195 - protein, 107 aa, synthetic construct
EIVLTQSPATLSLSPGERATLSCSVSSSVSYMHWYQQKPGQAPKLLIYDTSKLASGIPARFSGSGSGTDYTLTISSLEPEDFAVYYCQQWSSNPQYTFGQGTKLEIK

SEQ ID NO: 3196 - protein, 107 aa, synthetic construct
DIQLTQSPSTLSASVGDRVTITCSVSSSVSYMHWYQQKPGKAPKLLIYDTSKLASGVPSRFSGSGSGTEYTLTISSLQPDDFATYYCQQWSSNPQYTFGQGTKLEIK

SEQ ID NO: 3197 - protein, 107 aa, synthetic construct
DIQLTQSPSSLSASVGDRVTITCSVSSSVSYMHWYQQKPGKTPKLLIYDTSKLASGIPSRFSGSGSGTDYTLTIRSLQPEDFATYYCQQWSSNPQYTFGQGTKLEIK

SEQ ID NO: 3198 - protein, 107 aa, synthetic construct
EIVLTQSPPTLSLSPGERVTLSCSVSSSVSYMHWYQQKPGQAPKLLIYDTSKLASGIPARFSGSGSGTDYTLTISSLQPEDFAVYYCQQWSSNPQYTFGQGTKLEIK

SEQ ID NO: 3199 - protein, 107 aa, synthetic construct
DIQLTQSPSSLSASVGDRVTITCSVSSSVSYMHWYQQKPGKAPKRLIYDTSKLASGVPSRFSGSGSGTEYTLTISSLQPEDFATYYCQQWSSNPQYTFGQGTKLEIK

SEQ ID NO: 3200 - protein, 107 aa, synthetic construct
EIVLTQSPATLSLSPGERATLSCSVSSSVSYMHWYQQKPGQAPKLLIYDTSKLASGIPARFSGSGPGTDYTLTISSLEPEDFAVYYCQQWSSNPQYTFGQGTKLEIK

SEQ ID NO: 3201 - protein, 107 aa, synthetic construct
EIVLTQSPATLSLSPGERATLSCSVSSSVSYMHWYQQKPGQAPKLLIYDTSKLASGIPARFSGSGSGTDYTLTISRLEPEDFAVYYCQQWSSNPQYTFGQGTKLEIK

SEQ ID NO: 3202 - protein, 107 aa, synthetic construct
EIVLTQSPATLSLSPGERATLSCSVSSSVSYMHWYQQKPGQAPKLLIYDTSKLASGIPARFSGSGSGTDYTLTISSLQPEDFAVYYCQQWSSNPQYTFGQGTKLEIK

SEQ ID NO: 3203 - protein, 107 aa, synthetic construct
EIVLTQSPATLSVSPGERATLSCSVSSSVSYMHWYQQKPGQAPKLLIYDTSKLASGIPARFSGSGSGTEYTLTISSLQSEDFAVYYCQQWSSNPQYTFGQGTKLEIK

SEQ ID NO: 3204 - protein, 107 aa, synthetic construct
EIVLTQSPATLSVSPGERATLSCSVSSSVSYMHWYQQKPGQAPKLLIYDTSKLASGIPARFSGSGSGTEYTLTISILQSEDFAVYYCQQWSSNPQYTFGQGTKLEIK

SEQ ID NO: 3205 - protein, 107 aa, synthetic construct
EIVLTQSPPTLSLSPGERVTLSCSVSSSVSYMHWYQQKPGQAPKLLIYDTSKLASSIPARFSGSGSGTDYTLTISSLQPEDFAVYYCQQWSSNPQYTFGQGTKLEIK

SEQ ID NO: 3206 - protein, 107 aa, synthetic construct
DIQLTQSPSSLSASVGDRVTITCSVSSSVSYMHWYQQKPGKAPKSLIYDTSKLASGVPSRFSGSGSGTDYTLTISSLQPEDFATYYCQQWSSNPQYTFGQGTKLEIK

SEQ ID NO: 3207 - protein, 107 aa, synthetic construct
DIQLTQSPSSLSASVGDRVTITCSVSSSVSYMHWYQQKPGKAPKRLIYDTSKLASGVPSRFSGSGSGTEYTLTISNLQPEDFATYYCQQWSSNPQYTFGQGTKLEIK

SEQ ID NO: 3208 - protein, 107 aa, synthetic construct
DIQLTQSPSAMSASVGDRVTITCSVSSSVSYMHWYQQKPGKVPKRLIYDTSKLASGVPSRFSGSGSGTEYTLTISSLQPEDFATYYCQQWSSNPQYTFGQGTKLEIK

SEQ ID NO: 3209 - protein, 107 aa, synthetic construct
EIVLTQSPATLSLSPGERATLSCSVSSSVSYMHWYQQKPGQAPKLLIYDTSKLASGIPDRFSGSGSGTDYTLTISRLEPEDFAVYYCQQWSSNPQYTFGQGTKLEIK

SEQ ID NO: 3210 - protein, 107 aa, synthetic construct
EIVLTQSPATLSLSPGERATLSCSVSSSVSYMHWYQQKPGLAPKLLIYDTSKLASGIPDRFSGSGSGTDYTLTISRLEPEDFAVYYCQQWSSNPQYTFGQGTKLEIK

SEQ ID NO: 3211 - protein, 107 aa, synthetic construct
EIVLTQSPGTLSLSPGERATLSCSVSSSVSYMHWYQQKPGQAPKLLIYDTSKLASGIPDRFSGSGSGTDYTLTISRLEPEDFAVYYCQQWSSNPQYTFGQGTKLEIK

SEQ ID NO: 3212 - protein, 107 aa, synthetic construct
DIQLTQSPSSLSASVGDRVTITCSVSSSVSYMHWYQQKPGKAPKSLIYDTSKLASGVPSKFSGSGSGTDYTLTISSLQPEDFATYYCQQWSSNPQYTFGQGTKLEIK

SEQ ID NO: 3213 - protein, 107 aa, synthetic construct
DIQLTQSPSSLSASVGDRVTITCSVSSSVSYMHWYQQKPEKAPKSLIYDTSKLASGVPSRFSGSGSGTDYTLTISSLQPEDFATYYCQQWSSNPQYTFGQGTKLEIK

SEQ ID NO: 3214 - protein, 107 aa, synthetic construct
DIVLTQSPDSLAVSLGERATINCSVSSSVSYMHWYQQKPGQPPKLLIYDTSKLASGVPDRFSGSGSGTDYTLTISSLQAEDVAVYYCQQWSSNPQYTFGQGTKLEIK

SEQ ID NO: 3215 - protein, 107 aa, synthetic construct
EIVLTQTPLSLSITPGEQASMSCSVSSSVSYMHWYLQKARPVPKLLIYDTSKLASGVPDRFSGSGSGTDYTLKISRVEAEDFGVYYCQQWSSNPQYTFGQGTKLEIK

SEQ ID NO: 3216 - protein, 107 aa, synthetic construct
EIVLTQTPLSLSITPGEQASISCSVSSSVSYMHWYLQKARPVPKLLIYDTSKLASGVPDRFSGSGSGTDYTLKISRVEAEDFGVYYCQQWSSNPQYTFGQGTKLEIK

SEQ ID NO: 3217 - protein, 107 aa, synthetic construct
DIVLTQSPLSLPVTPGEPASISCSVSSSVSYMHWYLQKPGQSPKLLIYDTSKLASGVPDRFSGSGSGTDYTLKISRVEAEDVGVYYCQQWSSNPQYTFGQGTKLEIK

SEQ ID NO: 3218 - protein, 107 aa, synthetic construct
DIVLTQSPLSLPVTLGQPASISCSVSSSVSYMHWYQQRPGQSPKRLIYDTSKLASGVPDRFSGSGSGTDYTLKISRVEAEDVGVYYCQQWSSNPQYTFGQGTKLEIK

SEQ ID NO: 3219 - protein, 107 aa, synthetic construct
DIVLTQTPLSLPVTPGEPASISCSVSSSVSYMHWYLQKPGQSPKLLIYDTSKLASGVPDRFSGSGSGTDYTLKISRVEAEDVGVYYCQQWSSNPQYTFGQGTKLEIK

SEQ ID NO: 3220 - protein, 107 aa, synthetic construct
DIVLTQTPLSLSVTPGQPASISCSVSSSVSYMHWYLQKPGQSPKLLIYDTSKLASGVPDRFSGSGSGTDYTLKISRVEAEDVGVYYCQQWSSNPQYTFGQGTKLEIK

SEQ ID NO: 3221 - protein, 107 aa, synthetic construct
DIVLTQTPLSLSVTPGQPASISCSVSSSVSYMHWYLQKPGQPPKLLIYDTSKLASGVPDRFSGSGSGTDYTLKISRVEAEDVGVYYCQQWSSNPQYTFGQGTKLEIK

SEQ ID NO: 3222 - protein, 107 aa, synthetic construct
DIQLIQSPSFLSASVGDRVSIICSVSSSVSYMHWYLQKPGKSPKLFIYDTSKLASGVSSRFSGRGSGTDYTLTIISLKPEDFAAYYCQQWSSNPQYTFGQGTKLEIK

SEQ ID NO: 3223 - protein, 107 aa, synthetic construct
DIVLTQTPLSSPVTLGQPASISCSVSSSVSYMHWYQQRPGQPPKLLIYDTSKLASGVPDRFSGSGAGTDYTLKISRVEAEDVGVYYCQQWSSNPQYTFGQGTKLEIK

SEQ ID NO: 3224 - protein, 107 aa, synthetic construct
EITLTQSPAFMSATPGDKVNISCSVSSSVSYMHWYQQKPGEAPKFIIYDTSKLASGIPPRFSGSGYGTDYTLTINNIESEDAAYYYCQQWSSNPQYTFGQGTKLEIK

SEQ ID NO: 3225 - protein, 117 aa, synthetic construct
EVQLVESGGGLVKPGGSLRLSCAVSGFTFRSYGMSWVRQAPGKGLEWVALISSGGSYTYYTDSVKGRFTISRDNSKNTLYLQMNSLKTEDTAVYYCSRHGGNFFDYWGQGTTVTVSS

SEQ ID NO: 3226 - protein, 117 aa, synthetic construct
EVQLVESGGALVKPGGSLRLSCAVSGFTFRSYGMSWVRQAPGKGLEWVALISSGGSYTYYTDSVKGRFTISRDNSKNTLYLQMNSLKTEDTAVYYCSRHGGNFFDYWGQGTTVTVSS

SEQ ID NO: 3227 - protein, 117 aa, synthetic construct
EVQLVESGGGLVQPGGSLRLSCAVSGFTFRSYGMSWVRQAPGKGLEWVALISSGGSYTYYTDSVKGRFTISRDNAKNTLYLQMNSLRAEDTAVYYCSRHGGNFFDYWGQGTTVTVSS

SEQ ID NO: 3228 - protein, 117 aa, synthetic construct
EVQLVESGGGLVQPGGSLRLSCAVSGFTFRSYGMSWVRQAPGKGLEWVALISSGGSYTYYTDSVKGRFTISRDNAKNSLYLQMNSLRAEDTAVYYCSRHGGNFFDYWGQGTTVTVSS

SEQ ID NO: 3229 - protein, 117 aa, synthetic construct
EVQLVESGGGLVQPGGSLRLSCAVSGFTFRSYGMSWVRQAPGKGLEWVALISSGGSYTYYTDSVKGRFTISRDNSKNSLYLQMNSLKTEDTAVYYCSRHGGNFFDYWGQGTTVTVSS

SEQ ID NO: 3230 - protein, 117 aa, synthetic construct
EVQLVESGGGLVQPGGSLRLSCAVSGFTFRSYGMSWVRQAPGKGLEWVALISSGGSYTYYTDSVKGRFTISRDNAKNSLYLQMNSLRAEDMAVYYCSRHGGNFFDYWGQGTTVTVSS

SEQ ID NO: 3231 - protein, 117 aa, synthetic construct
EVQLVESGGGLVQPGGSLRLSCAVSGFTFRSYGMSWVRQAPGKGLEWVALISSGGSYTYYTDSVKGQFTISRDNAKNTLYLQMNSLRAEDMAVYYCSRHGGNFFDYWGQGTTVTVSS

SEQ ID NO: 3232 - protein, 117 aa, synthetic construct
EVQLVESGGGLVKPGRSLRLSCTVSGFTFRSYGMSWVRQAPGKGLEWVALISSGGSYTYYTDSVKGRFTISRDNSKNILYLQMNSLKTEDTAVYYCSRHGGNFFDYWGQGTTVTVSS

SEQ ID NO: 3233 - protein, 117 aa, synthetic construct
EVQLVESGGGLVKPGGSLRLSCAVSGFTFRSYGMSWVRQAPGKGLEWVALISSGGSYTYYTDSVKGRFTISRDNAKNSLYLQMNSLRAEDTAVYYCSRHGGNFFDYWGQGTTVTVSS

SEQ ID NO: 3234 - protein, 117 aa, synthetic construct
EVQLVESGGGLVQPGGSLKLSCAVSGFTFRSYGMSWVRQASGKGLEWVALISSGGSYTYYTDSVKGRFTISRDNSKNTLYLQMNSLKTEDTAVYYCSRHGGNFFDYWGQGTTVTVSS

SEQ ID NO: 3235 - protein, 117 aa, synthetic construct
QVQLVESGGGVVQPGGSLRLSCAVSGFTFRSYGMSWVRQAPGKGLEWVALISSGGSYTYYTDSVKGRFTISRDNSKNTLYLQMNSLRAEDTAVYYCSRHGGNFFDYWGQGTTVTVSS

SEQ ID NO: 3236 - protein, 117 aa, synthetic construct
QVQLVESGGGVVQPGRSLRLSCAVSGFTFRSYGMSWVRQAPGKGLEWVALISSGGSYTYYTDSVKGRFTISRDNSKNTLYLQMSSLRAEDTAVYYCSRHGGNFFDYWGQGTTVTVSS

SEQ ID NO: 3237 - protein, 117 aa, synthetic construct
EVQLVESGGGLVQPGGSLRLSCPVSGFTFRSYGMSWVRQAPGKGLEWVALISSGGSYTYYTDSVKGRFTISRDNANNSLYLQMNSLRAEDTAVYYCSRHGGNFFDYWGQGTTVTVSS

SEQ ID NO: 3238 - protein, 117 aa, synthetic construct
EVQLVESGGGLVQPGRSLRLSCTVSGFTFRSYGMSWVRQAPGKGLEWVALISSGGSYTYYTDSVKGRFTISRDNSKNILYLQMNSLKTEDTAVYYCSRHGGNFFDYWGQGTTVTVSS

SEQ ID NO: 3239 - protein, 117 aa, synthetic construct
EVQLVESGGGLVQPGPSLRLSCTVSGFTFRSYGMSWVRQAPGKGLEWVALISSGGSYTYYTDSVKGRFTISRDNSKNILYLQMNSLKTEDTAVYYCSRHGGNFFDYWGQGTTVTVSS

SEQ ID NO: 3240 - protein, 117 aa, synthetic construct
EVQLVESGGGLVQPGGSLRLSCAVSGFTFRSYGMSWVRQAPGKGLEWVALISSGGSYTYYTDSVKGRFTISRDNSKNTLYLQMNSLRAEDTAVYYCSRHGGNFFDYWGQGTTVTVSS

SEQ ID NO: 3241 - protein, 117 aa, synthetic construct
EVQLVESGGGLVQPGGSLRLSCAVSGFTFRSYGMSWVRQAPGKGLEWVALISSGGSYTYYTDSVKGRFTISRDNAKNSLYLQMNSLRDEDTAVYYCSRHGGNFFDYWGQGTTVTVSS

SEQ ID NO: 3242 - protein, 117 aa, synthetic construct
QVQLVESGGGLVKPGGSLRLSCAVSGFTFRSYGMSWVRQAPGKGLEWVALISSGGSYTYYTDSVKGRFTISRDNAKNSLYLQMNSLRAEDTAVYYCSRHGGNFFDYWGQGTTVTVSS

SEQ ID NO: 3243 - protein, 117 aa, synthetic construct
QVQLVESGGGVVQPGRSLRLSCAVSGFTFRSYGMSWVRQAPGKGLEWVALISSGGSYTYYTDSVKGRFTISRDNSKNTLYLQMNSLRAEDTAVYYCSRHGGNFFDYWGQGTTVTVSS

SEQ ID NO: 3244 - protein, 117 aa, synthetic construct
EVQLLESGGGLVQPGGSLRLSCAVSGFTFRSYGMSWVRQAPGKGLEWVALISSGGSYTYYTDSVKGRFTISRDNSKNTLYLQMNSLRAEDTAVYYCSRHGGNFFDYWGQGTTVTVSS

SEQ ID NO: 3245 - protein, 117 aa, synthetic construct
EVQLVESGGGLVQPGGSLRLSCAVSGFTFRSYGMSWVRQAPGKGLEWVALISSGGSYTYYTDSVKGRFTISRHNSKNTLYLQMNSLRAEDTAVYYCSRHGGNFFDYWGQGTTVTVSS

SEQ ID NO: 3246 - protein, 117 aa, synthetic construct
EVQLVESGGGLIQPGGSLRLSCAVSGFTFRSYGMSWVRQPPGKGLEWVALISSGGSYTYYTDSVKGRFTISRDNSKNTLYLQMNSLRAEDTAVYYCSRHGGNFFDYWGQGTTVTVSS

SEQ ID NO: 3247 - protein, 117 aa, synthetic construct
EVQLVESGGGLIQPGGSLRLSCAVSGFTFRSYGMSWVRQAPGKGLEWVALISSGGSYTYYTDSVKGRFTISRDNSKNTLYLQMNSLRAEDTAVYYCSRHGGNFFDYWGQGTTVTVSS

SEQ ID NO: 3248 - protein, 117 aa, synthetic construct
EVQLVESGGGLVQPGRSLRLSCAVSGFTFRSYGMSWVRQAPGKGLEWVALISSGGSYTYYTDSVKGRFTISRDNAKNSLYLQMNSLRAEDTALYYCSRHGGNFFDYWGQGTTVTVSS

SEQ ID NO: 3249 - protein, 117 aa, synthetic construct
QVQLVESGGGVVQPGRSLRLSCAVSGFTFRSYGMSWVRQAPGKGLEWVALISSGGSYTYYTDSVKGRFTISRDNSKNRLYLQMNSLRAEDTAVYYCSRHGGNFFDYWGQGTTVTVSS

SEQ ID NO: 3250 - protein, 117 aa, synthetic construct
QVQLVESGGGVVQPGRSLRLSCAVSGFTFRSYGMSWVRQAPGKGLEWVALISSGGSYTYYTDSVKGRFTISRDNSKNTLYLQMNSLRAEGTAVYYCSRHGGNFFDYWGQGTTVTVSS

SEQ ID NO: 3251 - protein, 117 aa, synthetic construct
QVQLVESGGGVVQPGRSLRLSCAVSGFTFRSYGMSWVRQAPGKGLEWVALISSGGSYTYYTDSVKGRFAISRDNSKNTLYLQMNSLRAEDTAVYYCSRHGGNFFDYWGQGTTVTVSS

SEQ ID NO: 3252 - protein, 117 aa, synthetic construct
QVQLVDSGGGVVQPGRSLRLSCAVSGFTFRSYGMSWVRQAPGKGLEWVALISSGGSYTYYTDSVKGRFTISRDNSKNTLYLQMNSLRAEDTAVYYCSRHGGNFFDYWGQGTTVTVSS

SEQ ID NO: 3253 - protein, 117 aa, synthetic construct
EVQLVESGGGVVRPGGSLRLSCAVSGFTFRSYGMSWVRQAPGKGLEWVALISSGGSYTYYTDSVKGRFTISRDNAKNSLYLQMNSLRAEDTALYHCSRHGGNFFDYWGQGTTVTVSS

SEQ ID NO: 3254 - protein, 117 aa, synthetic construct
EVQLVESGGVVVQPGGSLRLSCAVSGFTFRSYGMSWVRQAPGKGLEWVALISSGGSYTYYTDSVKGRFTISRDNSKNSLYLQMNSLRAEDTALYYCSRHGGNFFDYWGQGTTVTVSS

SEQ ID NO: 3255 - protein, 117 aa, synthetic construct
EVQLVESGGGVVQPGGSLRLSCAVSGFTFRSYGMSWVRQAPGKGLEWVALISSGGSYTYYTDSVKGRFTISRDNSKNSLYLQMNSLRTEDTALYYCSRHGGNFFDYWGQGTTVTVSS

SEQ ID NO: 3256 - protein, 117 aa, synthetic construct
EVQLVESGGVVVQPGGSLRLSCAVSGFTFRSYGMSWVRQAPGKGLEWVALISSGGSYTYYTDSVKGRFTISRDNSKNSLYLQMNSLRTEDTALYYCSRHGGNFFDYWGQGTTVTVSS

SEQ ID NO: 3257 - protein, 117 aa, synthetic construct
EVQLVETGGGLIQPGGSLRLSCAVSGFTFRSYGMSWVRQAPGKGLEWVALISSGGSYTYYTDSVKGRFTISRDNSKNTLYLQMNSLRAEDTAVYYCSRHGGNFFDYWGQGTTVTVSS

SEQ ID NO: 3258 - protein, 117 aa, synthetic construct
EVQLVESGGGLVQPGGSLRLSCAVSGFTFRSYGMSWVRQATGKGLEWVALISSGGSYTYYTDSVKGRFTISRENAKNSLYLQMNSLRAGDTAVYYCSRHGGNFFDYWGQGTTVTVSS

SEQ ID NO: 3259 - protein, 117 aa, synthetic construct
EVQLVESRGVLVQPGGSLRLSCAVSGFTFRSYGMSWVRQAPGKGLEWVALISSGGSYTYYTDSVKGRFTISRDNSKNTLHLQMNSLRAEDTAVYYCSRHGGNFFDYWGQGTTVTVSS

SEQ ID NO: 3260 - protein, 117 aa, synthetic construct
EVQLVESGGGLVQPGRSLRLSCAVSGFTFRSYGMSWVRQAPGKGLEWVALISSGGSYTYYTDSVKGRFTISRDNAKNSLYLQMNSLRAEDMALYYCSRHGGNFFDYWGQGTTVTVSS

SEQ ID NO: 3261 - protein, 117 aa, synthetic construct
QVQLVESGGGLVQPGGSLRLSCSVSGFTFRSYGMSWVRQAPGKGLEWVALISSGGSYTYYTDSVKGRFTISRDNSKNTLYLQMNSLRAEDTAVYYCSRHGGNFFDYWGQGTTVTVSS

SEQ ID NO: 3262 - protein, 117 aa, synthetic construct
EVQLVESGGGLVQPGGSLRLSCSVSGFTFRSYGMSWVRQAPGKGLEWVALISSGGSYTYYTDSVKGRFTISRDNSKNTLYLQMSSLRAEDTAVYYCSRHGGNFFDYWGQGTTVTVSS

SEQ ID NO: 3263 - protein, 117 aa, synthetic construct
QVQLVESGGGVVQPGRSLRLSCAVSGFTFRSYGMSWVRQAPGKGLEWVALISSGGSYTYYTDSVKGRFTISRDNSTNTLFLQMNSLRAEDTAVYYCSRHGGNFFDYWGQGTTVTVSS

SEQ ID NO: 3264 - protein, 117 aa, synthetic construct
QVQLLESGGGLVKPGGSLRLSCAVSGFTFRSYGMSWVRQAPGKGLEWVALISSGGSYTYYTDSVKGRFTISRDNAKNSLYLQMNSLRAEDTAVYYCSRHGGNFFDYWGQGTTVTVSS

SEQ ID NO: 3265 - protein, 117 aa, synthetic construct
EVQLVESGEGLVQPGGSLRLSCAVSGFTFRSYGMSWVRQAPGKGLEWVALISSGGSYTYYTDSVKGRFTISRDNSKNTLYLQMGSLRAEDMAVYYCSRHGGNFFDYWGQGTTVTVSS

SEQ ID NO: 3266 - protein, 117 aa, synthetic construct
EVQLVESGGGLVQPGGSLRLSCAVSGFTFRSYGMSWVRQAPGKGLEWVALISSGGSYTYYTDSVKGRFTISRDNSKNTLYLQMGSLRAEDMAVYYCSRHGGNFFDYWGQGTTVTVSS

SEQ ID NO: 3267 - protein, 117 aa, synthetic construct
EVQLVESGGGLVQPGGSLRLSCSVSGFTFRSYGMSWVRQAPGKGLEWVALISSGGSYTYYTDSVKGRFTISRDNSKNTLYVQMSSLRAEDTAVYYCSRHGGNFFDYWGQGTTVTVSS

SEQ ID NO: 3268 - protein, 117 aa, synthetic construct
EVQLVESGGGLVQPGGSLRLSCAVSGFTFRSYGMSWVRQAPGKGLEWVALISSGGSYTYYTDSVKGRFIISRDNSRNSLYLQKNRRRAEDMAVYYCSRHGGNFFDYWGQGTTVTVSS

SEQ ID NO: 3269 - protein, 117 aa, synthetic construct
EVQLVESGGGLVQPGGSLRLSCAVSGFTFRSYGMSWVHQAPGKGLEWVALISSGGSYTYYTDSVKGRFIISRDNSRNTLYLQTNSLRAEDTAVYYCSRHGGNFFDYWGQGTTVTVSS

SEQ ID NO: 3270 - protein, 117 aa, synthetic construct
EVHLVESGGGLVQPGGALRLSCAVSGFTFRSYGMSWVRQATGKGLEWVALISSGGSYTYYTDSVKGRFTISRENAKNSLYLQMNSLRAGDTAVYYCSRHGGNFFDYWGQGTTVTVSS

SEQ ID NO: 3271 - protein, 117 aa, synthetic construct
EVQLVESGGGLVQPRGSLRLSCAVSGFTFRSYGMSWVRQAPGKGLEWVALISSGGSYTYYTDSVKGRFTISRDNSKNTLYLQMNNLRAEGTAVYYCSRHGGNFFDYWGQGTTVTVSS

SEQ ID NO: 3272 - protein, 117 aa, synthetic construct
EVQLVESGGGLVQPRGSLRLSCAVSGFTFRSYGMSWVRQAPGKGLEWVALISSGGSYTYYTDSVKGRFTISRDNSKNTLYLQMNNLRAEGTAAYYCSRHGGNFFDYWGQGTTVTVSS

SEQ ID NO: 3273 - protein, 117 aa, synthetic construct
QVQLVQSGAEVKKPGASVKVSCKVSGFTFRSYGMSWVRQAPGKGLEWVALISSGGSYTYYTDSVKGRFTITRDNSTNTLYMELSSLRSEDTAVYYCSRHGGNFFDYWGQGTTVTVSS

SEQ ID NO: 3274 - protein, 117 aa, synthetic construct
QVQLVQSGSELKKPGASVKVSCKVSGFTFRSYGMSWVRQAPGQGLEWVALISSGGSYTYYTDSVKGRFVISRDNSVNTLYLQISSLKAEDTAVYYCSRHGGNFFDYWGQGTTVTVSS

SEQ ID NO: 3275 - protein, 470 aa, synthetic construct
METDTLLLWVLLLWVPGSTGQVQLVESGGGVVQPGRSLRLSCAASGIDFSRYWMSWVRQAPGKGLEWVGEINPDSSTINYAPSLKDRFTISRDNSKNTLYLQMSSLRAEDTAVYYCASLYYDYGDAMDYWGQGTTVTVSSASTKGPSVFPLAPSSKSTSGGTAALGCLVKDYFPEPVTVSWNSGALTSGVHTFPAVLQSSGLYSLSSVVTVPSSSLGTQTYICNVNHKPSNTKVDKRVEPKSCDKTHTCPPCPAPELLGGPSVFLFPPKPKDTLMISRTPEVTCVVVDVSHEDPEVKFNWYVDGVEVHNAKTKPREEQYNATYRVVSVLTVLHQDWLNGKEYKCKVSNKALPAPIEKTISKAKGQPREPQVYTLPPCREEMTKNQVSLWCLVKGFYPSDIAVEWESNGQPENNYKTTPPVLDSDGSFFLYSKLTVDKSRWQQGNVFSCSVMHEALHNHYTQKSLSLSPGK

SEQ ID NO: 3276 - protein, 503 aa, synthetic construct
METDTLLLWVLLLWVPGSTGQVQLVQSGAEVKKPGSSVKVSCKASGYSFTTYYIHWVRQAPGQGLEWMGWFFPGSGNIKYNEKFKGRVTITADTSTSTAYMELSSLRSEDTAVYYCAGSYYSYDVLDYWGQGTTVTVSSGGGGSGGGGSGGGGSGGGGSDIQMTQSPSFLSASVGDRVTITCKASQNVGINVVWHQQKPGKAPKALIYSSSHRYSGVPSRFSGSGSGTEFTLTISSLQPEDFATYFCQQFKSYPLTFGQGTKLEIKGGGGSGGGGSDKTHTCPPCPAPELLGGPSVFLFPPKPKDTLMISRTPEVTCVVVDVSHEDPEVKFNWYVDGVEVHNAKTKPREEQYASTYRVVSVLTVLHQDWLNGKEYKCKVSNKALPAPIEKTISKAKGQPREPQVCTLPPSREEMTKNQVSLSCAVKGFYPSDIAVEWESNGQPENNYKTTPPVLDSDGSFFLVSKLTVDKSRWQQGNVFSCSVMHEALHNHYTQKSLSLSPGK

SEQ ID NO: 3277 - protein, 234 aa, synthetic construct; identical to SEQ ID NO: 1007

SEQ ID NO: 3278 - protein, 469 aa, synthetic construct
METDTLLLWVLLLWVPGSTGQVQLVQSGAEVKKPGSSVKVSCKASGYSFTTYYIHWVRQAPGQGLEWMGWFFPGSGNIKYNEKFKGRVTITADTSTSTAYMELSSLRSEDTAVYYCAGSYYSYDVLDYWGQGTTVTVSSASTKGPSVFPLAPSSKSTSGGTAALGCLVKDYFPEPVTVSWNSGALTSGVHTFPAVLQSSGLYSLSSVVTVPSSSLGTQTYICNVNHKPSNTKVDKRVEPKSCDKTHTCPPCPAPELLGGPSVFLFPPKPKDTLMISRTPEVTCVVVDVSHEDPEVKFNWYVDGVEVHNAKTKPREEQYNSTYRVVSVLTVLHQDWLNGKEYKCKVSNKALPAPIEKTISKAKGQPREPQVYTLPPSREEMTKNQVSLTCLVKGFYPSDIAVEWESNGQPENNYKTTPPVLDSDGSFFLYSKLTVDKSRWQQGNVFSCSVMHEALHNHYTQKSLSLSPGK

SEQ ID NO: 3279 - protein, 234 aa, synthetic construct
METDTLLLWVLLLWVPGSTGDIQMTQSPSSLSASVGDRVTITCKASQNVGINVVWHQQKPGKVPKALIYSSSHRYSGVPSRFSGSGSGTDFTLTISSLQPEDVATYFCQQFKSYPLTFGQGTKLEIKRTVAAPSVFIFPPSDEQLKSGTASVVCLLNNFYPREAKVQWKVDNALQSGNSQESVTEQDSKDSTYSLSSTLTLSKADYEKHKVYACEVTHQGLSSPVTKSFNRGEC

SEQ ID NO: 3280 - protein, 247 aa, synthetic construct
METDTLLLWVLLLWVPGSTGDKTHTCPPCPAPELLGGPSVFLFPPKPKDTLMISRTPEVTCVVVDVSHEDPEVKFNWYVDGVEVHNAKTKPREEQYNSTYRVVSVLTVLHQDWLNGKEYKCKVSNKALPAPIEKTISKAKGQPREPQVYTLPPCREEMTKNQVSLWCLVKGFYPSDIAVEWESNGQPENNYKTTPPVLDSDGSFFLYSKLTVDKSRWQQGNVFSCSVMHEALHNRFTQKSLSLSPGK

SEQ ID NO: 3281 - protein, 520 aa, synthetic construct
METDTLLLWVLLLWVPGSTGEVQLVESGGGLVQPGGSLRLSCAASGFTFSNFGMHWVRQAPGKGLEWVSYISSGSSTIYYADTLKGRFTISRDNSKNTLYLQMNSLRAEDTAVYYCARRGEGAMDYWGQGTTVTVSSGGGGSGGGGSGGGGSGGGGSDNQLTQSPSFLSASVGDRVTITCRASSSVNYIYWYQQKPGKAPKLLIYYTSNLAPGVPSRFSGSGSGNEYTLTISSLQPEDFATYYCQQFTSSPFTFGQGTKLEIKGGGGSDKTHTCPPCPAPELLGGPSVFLFPPKPKDTLMISRTPEVTCVVVDVSHEDPEVKFNWYVDGVEVHNAKTKPREEQYNSTYRVVSVLTVLHQDWLNGKEYKCKVSNKALPAPIEKTISKAKGQPREPQVCTLPPSREEMTKNQVSLSCAVKGFYPSDIAVEWESNGQPENNYKTTPPVLDSDGSFFLVSKLTVDKSRWQQGNVFSCSVMHEALHNHYTQKSLSLSPGKGGGGSGGGGSGLNDIFEAQKIEWHE

SEQ ID NO: 3282 - protein, 284 aa, synthetic construct
METDTLLLWVLLLWVPGSTGGLNDIFEAQKIEWHEGGGGSEPRTDTDTCPNPPDPCPTCPTPDLLGGPSVFIFPPKPKDVLMISLTPKITCVVVDVSEEEPDVQFNWYVNNVEDKTAQTETRQRQYNSTYRVVSVLPIKHQDWMSGKVFKCKVNNNALPSPIEKTISKPRGQVRVPQIYTFPPPIEQTVKKDVSVTCLVTGFLPQDIHVEWESNGQPQPEQNYKNTQPVLDSDGSYFLYSKLNVPKSRWDQGDSFTCSVIHEALHNHHMTKTISRSLGNGGGGS

SEQ ID NO: 3283 - protein, 272 aa, synthetic construct
METDTLLLWVLLLWVPGSTGDKTHTCPPCPAPELLGGPSVFLFPPKPKDTLMISRTPEVTCVVVDVSHEDPEVKFNWYVDGVEVHNAKTKPREEQYNSTYRVVSVLTVLHQDWLNGKEYKCKVSNKALPAPIEKTISKAKGQPREPQVYTLPPSREEMTKNQVSLTCLVKGFYPSDIAVEWESNGQPENNYKTTPPVLDSDGSFFLYSKLTVDKSRWQQGNVFSCSVMHEALHNHYTQKSLSLSPGKGGGGSGGGGSGLNDIFEAQKIEWHE

SEQ ID NO: 3284 - protein, 469 aa, synthetic construct
METDTLLLWVLLLWVPGSTGQVQLQQSGPELVKPGASVKISCKASGYAFSSSWMNWVKQRPGQGLEWIGRIYPGDGDTKYNGKFKGKATLTADKSSSTAYMHLSSLTSVDSAVYFCARRGTGGWYFDVWGAGTTVTVSSAKTTAPSVYPLAPVCGDTTGSSVTLGCLVKGYFPEPVTLTWNSGSLSSGVHTFPAVLQSDLYTLSSSVTVTSSTWPSQSITCNVAHPASSTKVDKKIEPRGPTIKPCPPCKCPAPNLLGGPSVFIFPPKIKDVLMISLSPIVTCVVVDVSEDDPDVQISWFVNNVEVHTAQTQTHREDYNSTLRVVSALPIQHQDWMSGKEFKCKVNNKDLPAPIERTISKPKGSVRAPQVYVLPPPEEEMTKKQVTLTCMVTDFMPEDIYVEWTNNGKTELNYKNTEPVLDSDGSYFMYSKLRVEKKNWVERNSYSCSVVHEGLHNHHTTKSFSRTPGK

SEQ ID NO: 3285 - protein, 238 aa, synthetic construct
METDTLLLWVLLLWVPGSTGDIVLTQSPASLAVSLGQRATISCRASESVDSSGNSFMHWYQQKPGQPPQLLIYRASNLESGIPARFSGSGSRTDFTLTINPVEADDVATFYCQQSFDDPFTFGSGTKLEIKRADAAPTVSIFPPSSEQLTSGGASVVCFLNNFYPKDINVKWKIDGSERQNGVLNSWTDQDSKDSTYSMSSTLTLTKDEYERHNSYTCEATHKTSTSPIVKSFNRNEC

SEQ ID NO: 3286 - protein, 739 aa, synthetic construct
METDTLLLWVLLLWVPGSTGQVQLVESGGGVVQPGRSLRLSCAASGIDFSRYWMSWVRQAPGKGLEWVGEINPDSSTINYAPSLKDRFTISRDNSKNTLYLQMSSLRAEDTAVYYCASLYYDYGDAMDYWGQGTTVTVSSASTKGPSVFPLAPSSKSTSGGTAALGCLVKDYFPEPVTVSWNSGALTSGVHTFPAVLQSSGLYSLSSVVTVPSSSLGTQTYICNVNHKPSNTKVDKRVEPKSCDKTHTCPPCPAPELLGGPSVFLFPPKPKDTLMISRTPEVTCVVVDVSHEDPEVKFNWYVDGVEVHNAKTKPREEQYNSTYRVVSVLTVLHQDWLNGKEYKCKVSNKALPAPIEKTISKAKGQPREPQVYTLPPCREEMTKNQVSLWCLVKGFYPSDIAVEWESNGQPENNYKTTPPVLDSDGSFFLYSKLTVDKSRWQQGNVFSCSVMHEALHNHYTQKSLSLSPGKGGGGSGGGGSGGGGSEVQLVESGGGLVQPGGSLRLSCAASGFTFSTYAMNWVRQAPGKGLEWVSRIRSKYNNYATYYADSVKDRFTISRDDSKNTLYLQMNSLKTEDTAVYYCVRHGNFGNSYVSWFAYWGQGTLVTVSSGGGGSGGGGSGGGGSGGGGSQAVVTQEPSLTVSPGGTVTLTCRSSTGAVTTSNYANWVQQKPGQAPRGLIGGTNKRAPWTPARFSGSLLGGKAALTLSGAQPEDEAEYYCALWYSNLWVFGGGTKLTVL

SEQ ID NO: 3287 - protein, 247 aa, synthetic construct
METDTLLLWVLLLWVPGSTGDKTHTCPPCPAPELLGGPSVFLFPPKPKDTLMISRTPEVTCVVVDVSHEDPEVKFNWYVDGVEVHNAKTKPREEQYNSTYRVVSVLTVLHQDWLNGKEYKCKVSNKALPAPIEKTISKAKGQPREPQVCTLPPSREEMTKNQVSLSCAVKGFYPSDIAVEWESNGQPENNYKTTPPVLDSDGSFFLVSKLTVDKSRWQQGNVFSCSVMHEALHNHYTQKSLSLSPGK

SEQ ID NO: 3288 - protein, 20 aa, synthetic construct
METDTLLLWVLLLWVPGSTG

SEQ ID NO: 3289 - protein, 107 aa, synthetic construct; identical to SEQ ID NO: 230
  VARIANT 30: note = G, E, A or D
  VARIANT 32: note = R or K
  VARIANT 36: note = Y or H
  VARIANT 56: note = K or S

SEQ ID NO: 3290 - protein, 119 aa, synthetic construct; identical to SEQ ID NO: 231
  VARIANT 27: note = H, T, G or Y
  VARIANT 28: note = D, T or S
  VARIANT 30: note = H, R, D, K or T
  VARIANT 31: note = L, D, K, T or N
  VARIANT 32: note = W, F, T, I, Y or G
  VARIANT 50: note = R or W
  VARIANT 51: note = V, I or F
  VARIANT 52: note = F, S or Y
  VARIANT 53: note = A or P
  VARIANT 57: note = N or S
  VARIANT 58: note = T, V, Y or I
  VARIANT 59: note = K or R
  VARIANT 98: note = G or V
  VARIANT 100: note = Y or I
  VARIANT 103: note = Y or A
  VARIANT 104: note = D or G

SEQ ID NO: 3291 - protein, 238 aa, synthetic construct
DLKVEMMAGGTQITPLNDNVTIFCNIFYSQPLNITSMGITWFWKSLTFDKEVKVFEFFGDHQEAFRPGAIVSPWRLKSGDASLRLPGIQLEEAGEYRCEVVVTPLKAQGTVQLEVVASPASRLLLDQVGMKENEDKYMCESSGFYPEAINITWEKQTQKFPHPIEISEDVITGPTIKNMDGTFNVTSCLKLNSSQEDPGTVYQCVVRHASLHTPLRSNFTLTAARHSLSETEKTDNFS

SEQ ID NO: 3292 - protein, 284 aa, synthetic construct
EPHSLRYNLTVLSWDGSVQSGFLTEVHLDGQPFLRCDRQKCRAKPQGQWAEDVLGNKTWDRETRDLTGNGKDLRMTLAHIKDQKEGLHSLQEIRVCEIHEDNSTRSSQHFYYDGELFLSQNLETKEWTMPQSSRAQTLAMNVRNFLKEDAMKTKTHYHAMHADCLQELRRYLKSGVVLRRTVPPMVNVTRSEASEGNITVTCRASGFYPWNITLSWRQDGVSLSHDTQQWGDVLPDGNGTYQTWVATRICQGEEQRFTCYMEHSGNHSTHPVPSGKVLVLQSHW

SEQ ID NO: 3293 - protein, 287 aa, synthetic construct
AEPHSLRYNLMVLSQDESVQSGFLAEGHLDGQPFLRYDRQKRRAKPQGQWAEDVLGAKTWDTETEDLTENGQDLRRTLTHIKDQKGGLHSLQEIRVCEIHEDSSTRGSRHFYYDGELFLSQNLETQESTVPQSSRAQTLAMNVTNFWKEDAMKTKTHYRAMQADCLQKLQRYLKSGVAIRRTVPPMVNVTCSEVSEGNITVTCRASSFYPRNITLTWRQDGVSLSHNTQQWGDVLPDGNGTYQTWVATRIRQGEEQRFTCYMEHSGNHGTHPVPSGKVLVLQSQRTD

SEQ ID NO: 3294 - protein, 191 aa, synthetic construct
GWVDTHCLCYDFIITPKSRPEPQWCEVQGLVDERPFLHYDCVNHKAKAFASLGKKVNVTKTWEEQTETLRDVVDFLKGQLLDIQVENLIPIEPLTLQARMSCEHEAHGHGRGSWQFLFNGQKFLLFDSNNRKWTALHPGAKKMTEKWEKNRDVTMFFQKISLGDCKMWLEEFLMYWEQMLDPTKPPSLAPG

SEQ ID NO: 3295 - protein, 329 aa, synthetic construct
QDVRVQVLPEVRGQLGGTVELPCHLLPPVPGLYISLVTWQRPDAPANHQNVAAFHPKMGPSFPSPKPGSERLSFVSAKQSTGQDTEAELQDATLALHGLTVEDEGNYTCEFATFPKGSVRGMTWLRVIAKPKNQAEAQKVTFSQDPTTVALCISKEGRPPARISWLSSLDWEAKETQVSGTLAGTVTVTSRFTLVPSGRADGVTVTCKVEHESFEEPALIPVTLSVRYPPEVSISGYDDNWYLGRTDATLSCDVRSNPEPTGYDWSTTSGTFPTSAVAQGSQLVIHAVDSLFNTTFVCTVTNAVGMGRAEQVIFVRETPNTAGAGATGG

SEQ ID NO: 3296 - protein, 323 aa, synthetic construct
WPPPGTGDVVVQAPTQVPGFLGDSVTLPCYLQVPNMEVTHVSQLTWARHGESGSMAVFHQTQGPSYSESKRLEFVAARLGAELRNASLRMFGLRVEDEGNYTCLFVTFPQGSRSVDIWLRVLAKPQNTAEVQKVQLTGEPVPMARCVSTGGRPPAQITWHSDLGGMPNTSQVPGFLSGTVTVTSLWILVPSSQVDGKNVTCKVEHESFEKPQLLTVNLTVYYPPEVSISGYDNNWYLGQNEATLTCDARSNPEPTGYNWSTTMGPLPPFAVAQGAQLLIRPVDKPINTTLICNVTNALGARQAELTVQVKEGPPSEHSGISRN

SEQ ID NO: 3297 - protein, 330 aa, synthetic construct
QNLFTKDVTVIEGEVATISCQVNKSDDSVIQLLNPNRQTIYFRDFRPLKDSRFQLLNFSSSELKVSLTNVSISDEGRYFCQLYTDPPQESYTTITVLVPPRNLMIDIQKDTAVEGEEIEVNCTAMASKPATTIRWFKGNTELKGKSEVEEWSDMYTVTSQLMLKVHKEDDGVPVICQVEHPAVTGNLQTQRYLEVQYKPQVHIQMTYPLQGLTREGDALELTCEAIGKPQPVMVTWVRVDDEMPQHAVLSGPNLFINNLNKTDNGTYRCEASNIVGKAHSDYMLYVYDPPTTIPPPTTTTTTTTTTTTTILTIITDSRAGEEGSIRAVDH

SEQ ID NO: 3298 - protein, 155 aa, synthetic construct
QRFAQAQQQLPLESLGWDVAELQLNHTGPQQDPRLYWQGGPALGRSFLHGPELDKGQLRIHRDGIYMVHIQVTLAICSSTTASRHHPTTLAVGICSPASRSISLLRLSFHQGCTIASQRLTPLARGDTLCTNLTGTLLPSRNTDETFFGVQWVRP

SEQ ID NO: 3299 - protein, 294 aa, synthetic construct
WTYHYSEKPMNWQRARRFCRDNYTDLVAIQNKAEIEYLEKTLPFSRSYYWIGIRKIGGIWTWVGTNKSLTEEAENWGDGEPNNKKNKEDCVEIYIKRNKDAGKWNDDACHKLKAALCYTASCQPWSCSGHGECVEIINNYTCNCDVGYYGPQCQFVIQCEPLEAPELGTMDCTHPLGNFSFSSQCAFSCSEGTNLTGIEETTCGPFGNWSSPEPTCQVIQCEPLSAPDLGIMNCSHPLASFSFTSACTFICSEGTELIGKKKTICESSGIWSNPSPICQKLDKSFSMIKEGDYN

SEQ ID NO: 3300 - protein, 243 aa, synthetic construct
RYLQVSQQLQQTNRVLEVTNSSLRQQLRLKITQLGQSAEDLQGSRRELAQSQEALQVEQRAHQAAEGQLQACQADRQKTKETLQSEEQQRRALEQKLSNMENRLKPFFTCGSADTCCPSGWIMHQKSCFYISLTSKNWQESQKQCETLSSKLATFSEIYPQSHSYYFLNSLLPNGGSGNSYWTGLSSNKDWKLTDDTQRTRTYAQSSKCNKVHKTWSWWTLESESCRSSLPYICEMTAFRFPD

SEQ ID NO: 3301 - protein, 124 aa, synthetic construct
KLTRDSQSLCPYDWIGFQNKCYYFSKEEGDWNSSKYNCSTQHADLTIIDNIEEMNFLRRYKCSSDHWIGLKMAKNRTGQWVDGATFTKSFGMRGSEGCAYLSDDGAATARCYTERKWICRKRIH

SEQ ID NO: 3302 - protein, 194 aa, synthetic construct
QGHLVHMTVVSGSNVTLNISESLPENYKQLTWFYTFDQKIVEWDSRKSKYFESKFKGRVRLDPQSGALYISKVQKEDNSTYIMRVLKKTGNEQEWKIKLQVLDPVPKPVIKIEKIEDMDDNCYLKLSCVIPGESVNYTWYGDKRPFPKELQNSVLETTLMPHNYSRCYTCQVSNSVSSKNGTVCLSPPCTLARS

SEQ ID NO: 3303 - protein, 133 aa, synthetic construct
QVSHRYPRIQSIKVQFTEYKKEKGFILTSQKEDEIMKVQNNSVIINCDGFYLISLKGYFSQEVNISLHYQKDEEPLFQLKKVRSVNSLMVASLTYKDKVYLNVTTDNTSLDDFHVNGGELILIHQNPGEFCVL

SEQ ID NO: 3304 - protein, 149 aa, synthetic construct
MQKGDQNPQIAAHVISEASSKTTSVLQWAEKGYYTMSNNLVTLENGKQLTVKRQGLYYIYAQVTFCSNREASSQAPFIASLCLKSPGRFERILLRAANTHSSAKPCGQQSIHLGGVFELQPGASVFVNVTDPSQVSHGTGFTSFGLLKL

SEQ ID NO: 3305 - protein, 205 aa, synthetic construct
ACPWAVSGARASPGSAASPRLREGPELSPDDPAGLLDLRQGMFAQLVAQNVLLIDGPLSWYSDPGLAGVSLTGGLSYKEDTKELVVAKAGVYYVFFQLELRRVVAGEGSGSVSLALHLQPLRSAAGAAALALTVDLPPASSEARNSAFGFQGRLLHLSAGQRLGVHLHTEARARHAWQLTQGATVLGLFRVTPEIPAGLPSPRSE

SEQ ID NO: 3306 - protein, 455 aa, synthetic construct
LNFRAPPVIPNVPFLWAWNAPSEFCLGKFDEPLDMSLFSFIGSPRINATGQGVTIFYVDRLGYYPYIDSITGVTVNGGIPQKISLQDHLDKAKKDITFYMPVDNLGMAVIDWEEWRPTWARNWKPKDVYKNRSIELVQQQNVQLSLTEATEKAKQEFEKAGKDFLVETIKLGKLLRPNHLWGYYLFPDCYNHHYKKPGYNGSCFNVEIKRNDDLSWLWNESTALYPSIYLNTQQSPVAATLYVRNRVREAIRVSKIPDAKSPLPVFAYTRIVFTDQVLKFLSQDELVYTFGETVALGASGIVIWGTLSIMRSMKSCLLLDNYMETILNPYIINVTLAAKMCSQVLCQEQGVCIRKNWNSSDYLHLNPDNFAIQLEKGGKFTVRGKPTLEDLEQFSEKFYCSCYSTLSCKEKADVKDTDAVDVCIADGVCIDAFLKPPMETEEPQIFYNASPSTLS

SEQ ID NO: 3307 - protein, 5 aa, synthetic construct
GGGGS

SEQ ID NO: 3308 - protein, 10 aa, synthetic construct
GGGGSGGGGS

SEQ ID NO: 3309 - protein, 15 aa, synthetic construct
GGGGSGGGGSGGGGS

SEQ ID NO: 3310 - protein, 17 aa, synthetic construct
DVPSGPGGGGGSGGGGS

SEQ ID NO: 3311 - protein, 455 aa, synthetic construct; identical to SEQ ID NO: 3306

SEQ ID NO: 3312 - protein, 413 aa, synthetic construct
FRGPLLPNRPFTTVWNANTQWCLERHGVDVDVSVFDVVANPGQTFRGPDMTIFYSSQGTYPYYTPTGEPVFGGLPQNASLIAHLARTFQDILAAIPAPDFSGLAVIDWEAWRPRWAFNWDTKDIYRQRSRALVQAQHPDWPAPQVEAVAQDQFQGAARAWMAGTLQLGRALRPRGLWGFYGFPDCYNYDFLSPNYTGQCPSGIRAQNDQLGWLWGQSRALYPSIYMPAVLEGTGKSQMYVQHRVAEAFRVAVAAGDPNLPVLPYVQIFYDTTNHFLPLDELEHSLGESAAQGAAGVVLWVSWENTRTKESCQAIKEYMDTTLGPFILNVTSGALLCSQALCSGHGRCVRRTSHPKALLLLNPASFSIQLTPGGGPLSLRGALSLEDQAQMAVEFKCRCYPGWQAPWCERKSMW

SEQ ID NO: 3313 - protein, 551 aa, synthetic construct
YNFFPRKPKWDKNQITYRIIGYTPDLDPETVDDAFARAFQVWSDVTPLRFSRIHDGEADIMINFGRWEHGDGYPFDGKDGLLAHAFAPGTGVGGDSHFDDDELWTLGEGQVVRVKYGNADGEYCKFPFLFNGKEYNSCTDTGRSDGFLWCSTTYNFEKDGKYGFCPHEALFTMGGNAEGQPCKFPFRFQGTSYDSCTTEGRTDGYRWCGTTEDYDRDKKYGFCPETAMSTVGGNSEGAPCVFPFTFLGNKYESCTSAGRSDGKMWCATTANYDDDRKWGFCPDQGYSLFLVAAHEFGHAMGLEHSQDPGALMAPIYTYTKNFRLSQDDIKGIQELYGASPDIDLGTGPTPTLGPVTPEICKQDIVFDGIAQIRGEIFFFKDRFIWRTVTPRDKPMGPLLVATFWPELPEKIDAVYEAPQEEKAVFFAGNEYWIYSASTLERGYPKPLTSLGLPPDVQRVDAAFNWSKNKKTYIFAGDKFWRYNEVKKKMDPGFPKLIADAWNAIPDNLDAVVDLQGGGHSYFFKGAYYLKLENQSLKSVKFGSIKSDWLGC

SEQ ID NO: 3314 - protein, 14 aa, synthetic construct
AEAAAKEAAAKAAA

SEQ ID NO: 3315 - protein, 19 aa, synthetic construct
AEAAAKEAAAKEAAAKAAA

SEQ ID NO: 3316 - protein, 24 aa, synthetic construct
AEAAAKEAAAKEAAAKEAAAKAAA

SEQ ID NO: 3317 - protein, 29 aa, synthetic construct
AEAAAKEAAAKEAAAKEAAAKEAAAKAAA

SEQ ID NO: 3318-3376 - skipped (59 entries)

SEQ ID NO: 3377 - protein, 107 aa, synthetic construct; identical to SEQ ID NO: 93

SEQ ID NO: 3378 - protein, 107 aa, synthetic construct; identical to SEQ ID NO: 117

SEQ ID NO: 3379 - protein, 107 aa, synthetic construct; identical to SEQ ID NO: 199

SEQ ID NO: 3380 - protein, 107 aa, synthetic construct; identical to SEQ ID NO: 181

SEQ ID NO: 3381 - protein, 107 aa, synthetic construct; identical to SEQ ID NO: 87

SEQ ID NO: 3382 - protein, 107 aa, synthetic construct; identical to SEQ ID NO: 160

SEQ ID NO: 3383 - protein, 107 aa, synthetic construct; identical to SEQ ID NO: 147

SEQ ID NO: 3384 - protein, 107 aa, synthetic construct; identical to SEQ ID NO: 141

SEQ ID NO: 3385 - protein, 107 aa, synthetic construct; identical to SEQ ID NO: 81

SEQ ID NO: 3386 - protein, 107 aa, synthetic construct; identical to SEQ ID NO: 90

SEQ ID NO: 3387 - protein, 107 aa, synthetic construct; identical to SEQ ID NO: 102

SEQ ID NO: 3388 - protein, 107 aa, synthetic construct; identical to SEQ ID NO: 99

SEQ ID NO: 3389 - protein, 107 aa, synthetic construct; identical to SEQ ID NO: 108

SEQ ID NO: 3390 - protein, 119 aa, synthetic construct; identical to SEQ ID NO: 221

SEQ ID NO: 3391 - protein, 119 aa, synthetic construct; identical to SEQ ID NO: 223

SEQ ID NO: 3392 - protein, 119 aa, synthetic construct; identical to SEQ ID NO: 225

SEQ ID NO: 3393 - protein, 119 aa, synthetic construct; identical to SEQ ID NO: 219

SEQ ID NO: 3394 - protein, 119 aa, synthetic construct; identical to SEQ ID NO: 217

SEQ ID NO: 3395 - protein, 119 aa, synthetic construct; identical to SEQ ID NO: 211

SEQ ID NO: 3396 - protein, 119 aa, synthetic construct; identical to SEQ ID NO: 215

SEQ ID NO: 3397 - protein, 119 aa, synthetic construct; identical to SEQ ID NO: 213

SEQ ID NO: 3398 - protein, 119 aa, synthetic construct; identical to SEQ ID NO: 207

SEQ ID NO: 3399 - protein, 119 aa, synthetic construct; identical to SEQ ID NO: 209

SEQ ID NO: 3400 - protein, 119 aa, synthetic construct; identical to SEQ ID NO: 121

SEQ ID NO: 3401 - protein, 119 aa, synthetic construct; identical to SEQ ID NO: 182

SEQ ID NO: 3402 - protein, 119 aa, synthetic construct; identical to SEQ ID NO: 176

SEQ ID NO: 3403 - protein, 119 aa, synthetic construct; identical to SEQ ID NO: 158

SEQ ID NO: 3404 - protein, 119 aa, synthetic construct; identical to SEQ ID NO: 155

SEQ ID NO: 3405 - protein, 119 aa, synthetic construct; identical to SEQ ID NO: 118

SEQ ID NO: 3406 - protein, 119 aa, synthetic construct; identical to SEQ ID NO: 82

SEQ ID NO: 3407 - protein, 119 aa, synthetic construct; identical to SEQ ID NO: 106

SEQ ID NO: 3408 - protein, 119 aa, synthetic construct; identical to SEQ ID NO: 200

SEQ ID NO: 3409 - protein, 119 aa, synthetic construct; identical to SEQ ID NO: 124

SEQ ID NO: 3410 - protein, 119 aa, synthetic construct; identical to SEQ ID NO: 94

SEQ ID NO: 3411 - protein, 119 aa, synthetic construct; identical to SEQ ID NO: 151

SEQ ID NO: 3412 - protein, 119 aa, synthetic construct; identical to SEQ ID NO: 197

SEQ ID NO: 3413 - protein, 119 aa, synthetic construct; identical to SEQ ID NO: 130

SEQ ID NO: 3414 - protein, 119 aa, synthetic construct; identical to SEQ ID NO: 173

SEQ ID NO: 3415 - protein, 119 aa, synthetic construct; identical to SEQ ID NO: 142

SEQ ID NO: 3416 - protein, 119 aa, synthetic construct; identical to SEQ ID NO: 91

SEQ ID NO: 3417 - protein, 119 aa, synthetic construct; identical to SEQ ID NO: 139

SEQ ID NO: 3418 - protein, 119 aa, synthetic construct; identical to SEQ ID NO: 185

SEQ ID NO: 3419 - protein, 119 aa, synthetic construct; identical to SEQ ID NO: 133

SEQ ID NO: 3420 - protein, 119 aa, synthetic construct; identical to SEQ ID NO: 188

SEQ ID NO: 3421 - protein, 119 aa, synthetic construct; identical to SEQ ID NO: 109

SEQ ID NO: 3422 - protein, 119 aa, synthetic construct; identical to SEQ ID NO: 97

SEQ ID NO: 3423 - protein, 119 aa, synthetic construct; identical to SEQ ID NO: 85

SEQ ID NO: 3424 - protein, 119 aa, synthetic construct; identical to SEQ ID NO: 115

SEQ ID NO: 3425 - protein, 119 aa, synthetic construct; identical to SEQ ID NO: 191

SEQ ID NO: 3426 - protein, 119 aa, synthetic construct; identical to SEQ ID NO: 136

SEQ ID NO: 3427 - protein, 119 aa, synthetic construct; identical to SEQ ID NO: 203

SEQ ID NO: 3428 - protein, 119 aa, synthetic construct; identical to SEQ ID NO: 103

SEQ ID NO: 3429 - protein, 119 aa, synthetic construct; identical to SEQ ID NO: 205

SEQ ID NO: 3430 - protein, 119 aa, synthetic construct; identical to SEQ ID NO: 100

SEQ ID NO: 3431 - protein, 119 aa, synthetic construct; identical to SEQ ID NO: 179

SEQ ID NO: 3432 - protein, 119 aa, synthetic construct; identical to SEQ ID NO: 88

SEQ ID NO: 3433 - protein, 119 aa, synthetic construct; identical to SEQ ID NO: 167

SEQ ID NO: 3434 - protein, 119 aa, synthetic construct; identical to SEQ ID NO: 161

SEQ ID NO: 3435 - protein, 119 aa, synthetic construct; identical to SEQ ID NO: 145

SEQ ID NO: 3436 - protein, 119 aa, synthetic construct; identical to SEQ ID NO: 148

SEQ ID NO: 3437 - protein, 27 aa, synthetic construct
  VARIANT 12..26: note = EAAAK repeats may be deleted
AEAAAKEAAAKEAAAKEAAAKEAAAKA

SEQ ID NO: 3438 - protein, 117 aa, synthetic construct; identical to SEQ ID NO: 24

SEQ ID NO: 3439 - protein, 116 aa, synthetic construct
EVQLLESGGGLVQPGGSLRLSCAASGFTFSSYAMSWVRQAPGKGLEWVSAISGSGGSTYYADSVKGRFTISRDNSKNTLYLQMNSLRAEDTAVYYCAKVLGWFDYWGQGTLVTVSS

SEQ ID NO: 3440 - protein, 109 aa, synthetic construct
EIVLTQSPGTLSLSPGERATLSCRASQSVSSSYLAWYQQKPGQAPRLLIYGASSRATGIPDRFSGSGSGTDFTLTISRLEPEDFAVYYCQQYGYPPDFTFGQGTKVEIK

SEQ ID NO: 3441 - protein, 119 aa, synthetic construct
EVQLLESGGGLVQPGGSLRLSCAASGFTFSSYAMSWVRQAPGKGLEWVSAISGSGGSTYYADSVKGRFTISRDNSKNTLYLQMNSLRAEDTAVYYCAKVAPYFAPFDYWGQGTLVTVSS

SEQ ID NO: 3442 - protein, 109 aa, synthetic construct
EIVLTQSPGTLSLSPGERATLSCRASQSVSSSYLAWYQQKPGQAPRLLIYGASSRATGIPDRFSGSGSGTDFTLTISRLEPEDFAVYYCQQYGNPPLYTFGQGTKVEIK

SEQ ID NO: 3443 - protein, 116 aa, synthetic construct
EVQLVQSGAEVKKPGESLKISCKGSGYSFTSYWIGWVRQMPGKGLEWMGIIYPGDSDTRYSPSFQGQVTISADKSISTAYLQWSSLKASDTAMYYCARNGYLGDYWGQGTLVTVSS

SEQ ID NO: 3444 - protein, 111 aa, synthetic construct
DIVMTQSPLSLPVTPGEPASISCRSSQSLLHSNGYNYLDWYLQKPGQSPQLLIYLGSNRASGVPDRFSGSGSGTDFTLKISRVEAEDVGVYYCMQAMQIPTFGQGTKVEIK

SEQ ID NO: 3445 - protein, 120 aa, synthetic construct
QVQLQQSGGGLVQPGGSLKLSCAASGIDFSRYWMSWVRRAPGKGLEWIGEINPDSSTINYAPSLKDKFIISRDNAKNTLYLQMSKVRSEDTALYYCASLYYDYGDAMDYWGQGTSVTVSS

SEQ ID NO: 3446 - protein, 108 aa, synthetic construct
DIVMTQSQRFMTTSVGDRVSVTCKASQSVDSNVAWYQQKPRQSPKALIFSASLRFSGVPARFTGSGSGTDFTLTISNLQSEDLAEYFCQQYNNYPLTFGAGTKLELKR

SEQ ID NO: 3447 - protein, 123 aa, synthetic construct
EVQLVESGGGLVKPGGSLRLSCAASGFTFGDYALSWFRQAPGKGLEWVGVSRSKAYGGTTDYAASVKGRFTISRDDSKSTAYLQMNSLKTEDTAVYYCASSGYSSGWTPFDYWGQGTLVTVSS

SEQ ID NO: 3448 - protein, 111 aa, synthetic construct
QSVLTQPPSASGTPGQRVTISCSGSSSNIGSNTVNWYQQLPGTAPKLLIFNYHQRPSGVPDRFSGSKSGSSASLAISGLQSEDEADYYCAAWDDSLNGWVFGGGTKLTVLG

SEQ ID NO: 3449 - protein, 101 aa, Homo sapiens
IAGITQAPTSQILAAGRRMTLRCTQDMRHNAMYWYRQDLGLGLRLIHYSNTAGTTGKGEVPDGYSVSRANTDDFPLTLASAVPSQTSVYFCASSWSFGTEA

SEQ ID NO: 3450 - protein, 100 aa, Homo sapiens
GVTQTPKFQVLKTGQSMTLQCAQDMNHEYMSWYRQDPGMGLRLIHYSVGAGITDQGEVPNGYNVSRSTTEDFPLRLLSAAPSQTSVYFCASSYVGNTGEL

SEQ ID NO: 3451 - protein, 100 aa, Homo sapiens
KVTQSSRYLVKRTGEKVFLECVQDMDHENMFWYRQDPGLGLRLIYFSYDVKMKEKGDIPEGYSVSREKKERFSLILASASTDQTSMYLCASSFLGTGVEQ

SEQ ID NO: 3452 - protein, 100 aa, Homo sapiens
GGITQSPKYLFRKEGQNVTLSCEQNLNHDAMYWYRQDPGQGLRLIYYSQIVNDFQKGDIAEGYSVSREKKESFPLTVTSAQKNPTAFYLCASSSRSSYEQ

SEQ ID NO: 3453 - protein, 101 aa, Homo sapiens
GVTQTPKHLITATGQRVTLRCSPRSGDLSVYWYQQSLDQGLQFLIQYYNGEERAKGNILERFSAQQFPDLHSELNLSSLELGDSALYFCASSVAGTPSYEQ

SEQ ID NO: 3454 - protein, 100 aa, Homo sapiens
AGVTQTPRYLIKTRGQQVTLSCSPISGHRSVSWYQQTPGQGLQFLFEYFSETQRNKGNFPGRFSGRQFSNSRSEMNVSTLELGDSALYLCASSFNMATGQ

SEQ ID NO: 3455 - protein, 99 aa, Homo sapiens
AVVSQHPSRVIVKSGTSVKIECRSLDFQATTMFWYRQFPSLMLMATSNEGSKATYEQGVEKDKFLINHASLTLSTLTVTSAHPEDSGFYICSALAGDTQ

SEQ ID NO: 3456 - protein, 106 aa, Homo sapiens
MDAGVIQSPRHEVTEMGQQVTLRCKPISGHDYLFWYRQTMMRGLELLIYFNNNVPIDDSGMPEDRFSAKMPNASFSTLKIQPSEPRDSAVYFCASSLWEKLAKNIQ

SEQ ID NO: 3457 - protein, 28 aa, Homo sapiens
DTGITQTPKYLVTAMGSKRTMKREHLGH

SEQ ID NO: 3458 - protein, 22 aa, Homo sapiens
DSMYWYRQKAKKSLEFMFYYNC

SEQ ID NO: 3459 - protein, 44 aa, Homo sapiens
KEFIENKTVPNHFTPECPDSSRLYLHVVALQQEDSAAYLCTSSQ

SEQ ID NO: 3460 - protein, 29 aa, Homo sapiens
EPEVTQTPSHQVTQMGQEVILRCVPISNH

SEQ ID NO: 3461 - protein, 22 aa, Homo sapiens
LYFYWYRQILGQKVEFLVSFYN

SEQ ID NO: 3462 - protein, 45 aa, Homo sapiens
NEISEKSEIFDDQFSVERPDGSNFTLKIRSTKLEDSAMYFCASSE

SEQ ID NO: 3463 - protein, 29 aa, Homo sapiens
DTAVSQTPKYLVTQMGNDKSIKCEQNLGH

SEQ ID NO: 3464 - protein, 22 aa, Homo sapiens
DTMYWYKQDSKKFLKIMFSYNN

SEQ ID NO: 3465 - protein, 44 aa, Homo sapiens
KELIINETVPNRFSPKSPDKAHLNLHINSLELGDSAVYFCASSQ

SEQ ID NO: 3466 - protein, 22 aa, Homo sapiens
DTAVSQTPKYLVTQMGKKESLK

SEQ ID NO: 3467 - protein, 6 aa, Homo sapiens
EQNLGH

SEQ ID NO: 3468 - protein, 22 aa, Homo sapiens
NAMYWYKQDSKKFLKTMFIYSN

SEQ ID NO: 3469 - protein, 44 aa, Homo sapiens
KEPILNETVPNRFSPDSPDKAHLNLHINSLELGDSAVYFCASSQ

SEQ ID NO: 3470 - protein, 29 aa, Homo sapiens
DTEVTQTPKHLVMGMTNKKSLKCEQHMGH

SEQ ID NO: 3471 - protein, 22 aa, Homo sapiens
RAMYWYKQKAKKPPELMFVYSY

SEQ ID NO: 3472 - protein, 44 aa, Homo sapiens
EKLSINESVPSRFSPECPNSSLLNLHLHALQPEDSALYLCASSQ

SEQ ID NO: 3473 - protein, 29 aa, Homo sapiens
ETGVTQTPRHLVMGMTNKKSLKCEQHLGH

SEQ ID NO: 3474 - protein, 22 aa, Homo sapiens
NAMYWYKQSAKKPLELMFVYNF

SEQ ID NO: 3475 - protein, 44 aa, Homo sapiens
KEQTENNSVPSRFSPECPNSSHLFLHLHTLQPEDSALYLCASSQ

SEQ ID NO: 3476 - protein, 29 aa, Homo sapiens
ETGVTQTPRHLVMGMTNKKSLKCEQHLGH

SEQ ID NO: 3477 - protein, 22 aa, Homo sapiens
NAMYWYKQSAKKPLELMFVYSL

SEQ ID NO: 3478 - protein, 44 aa, Homo sapiens
EERVENNSVPSRFSPECPNSSHLFLHLHTLQPEDSALYLCASSQ

SEQ ID NO: 3479 - protein, 29 aa, Homo sapiens
KAGVTQTPRYLIKTRGQQVTLSCSPISGH

SEQ ID NO: 3480 - protein, 22 aa, Homo sapiens
RSVSWYQQTPGQGLQFLFEYFS

SEQ ID NO: 3481 - protein, 44 aa, Homo sapiens
ETQRNKGNFPGRFSGRQFSNSRSEMNVSTLELGDSALYLCASSL

SEQ ID NO: 3482 - protein, 29 aa, Homo sapiens
EAGVTQSPTHLIKTRGQQVTLRCSPISGH

SEQ ID NO: 3483 - protein, 22 aa, Homo sapiens
SSVSWYQQAPGQGPQFIFEYAN

SEQ ID NO: 3484 - protein, 44 aa, Homo sapiens
ELRRSEGNFPNRFSGRQFHDCCSEMNVSALELGDSALYLCARSL

SEQ ID NO: 3485 - protein, 29 aa, Homo sapiens
ETGVTQSPTHLIKTRGQQVTLRCSSQSGH

SEQ ID NO: 3486 - protein, 22 aa, Homo sapiens
NTVSWYQQALGQGPQFIFQYYR

SEQ ID NO: 3487 - protein, 44 aa, Homo sapiens
EEENGRGNFPPRFSGLQFPNYSSELNVNALELDDSALYLCASSL

SEQ ID NO: 3488 - protein, 29 aa, Homo sapiens
DAGVTQSPTHLIKTRGQQVTLRCSPISGH

SEQ ID NO: 3489 - protein, 22 aa, Homo sapiens
KSVSWYQQVLGQGPQFIFQYYE

SEQ ID NO: 3490 - protein, 44 aa, Homo sapiens
KEERGRGNFPDRFSARQFPNYSSELNVNALLLGDSALYLCASSL

SEQ ID NO: 3491 - protein, 29 aa, Homo sapiens
DAGVTQSPTHLIKTRGQQVTLRCSPKSGH

SEQ ID NO: 3492 - protein, 22 aa, Homo sapiens
DTVSWYQQALGQGPQFIFQYYE

SEQ ID NO: 3493 - protein, 44 aa, Homo sapiens
EEERQRGNFPDRFSGHQFPNYSSELNVNALLLGDSALYLCASSL

SEQ ID NO: 3494 - protein, 29 aa, Homo sapiens
DAGVTQSPTHLIKTRGQHVTLRCSPISGH

SEQ ID NO: 3495 - protein, 22 aa, Homo sapiens
TSVSSYQQALGQGPQFIFQYYE

SEQ ID NO: 3496 - protein, 44 aa, Homo sapiens
KEERGRGNFPDQFSGHQFPNYSSELNVNALLLGDSALYLCASSL

SEQ ID NO: 3497 - protein, 29 aa, Homo sapiens
EAGVTQSPTHLIKTRGQQATLRCSPISGH

SEQ ID NO: 3498 - protein, 22 aa, Homo sapiens
TSVYWYQQALGLGLQFLLWYDE

SEQ ID NO: 3499 - protein, 44 aa, Homo sapiens
GEERNRGNFPPRFSGRQFPNYSSELNVNALELEDSALYLCASSL

SEQ ID NO: 3500 - protein, 29 aa, Homo sapiens
NAGVTQTPKFQVLKTGQSMTLQCAQDMNH

SEQ ID NO: 3501 - protein, 22 aa, Homo sapiens
NSMYWYRQDPGMGLRLIYYSAS

SEQ ID NO: 3502 - protein, 44 aa, Homo sapiens
EGTTDKGEVPNGYNVSRLNKREFSLRLESAAPSQTSVYFCASSE

SEQ ID NO: 3503 - protein, 29 aa, Homo sapiens
NAGVTQTPKFRVLKTGQSMTLLCAQDMNH

SEQ ID NO: 3504 - protein, 22 aa, Homo sapiens
EYMYWYRQDPGMGLRLIHYSVG

SEQ ID NO: 3505 - protein, 44 aa, Homo sapiens
EGTTAKGEVPDGYNVSRLKKQNFLLGLESAAPSQTSVYFCASSY

SEQ ID NO: 3506 - protein, 29 aa, Homo sapiens
NAGVTQTPKFRVLKTGQSMTLLCAQDMNH

SEQ ID NO: 3507 - protein, 22 aa, Homo sapiens
EYMYWYRQDPGMGLRLIHYSVG

SEQ ID NO: 3508 - protein, 44 aa, Homo sapiens; identical to SEQ ID NO: 3505

SEQ ID NO: 3509 - protein, 29 aa, Homo sapiens
IAGITQAPTSQILAAGRRMTLRCTQDMRH

SEQ ID NO: 3510 - protein, 22 aa, Homo sapiens
NAMYWYRQDLGLGLRLIHYSNT

SEQ ID NO: 3511 - protein, 44 aa, Homo sapiens
AGTTGKGEVPDGYSVSRANTDDFPLTLASAVPSQTSVYFCASSD

SEQ ID NO: 3512 - protein, 29 aa, Homo sapiens
NAGVTQTPKFQVLKTGQSMTLQCAQDMNH

SEQ ID NO: 3513 - protein, 22 aa, Homo sapiens
EYMSWYRQDPGMGLRLIHYSVG

SEQ ID NO: 3514 - protein, 44 aa, Homo sapiens
AGITDQGEVPNGYNVSRSTTEDFPLRLLSAAPSQTSVYFCASSY

SEQ ID NO: 3515 - protein, 29 aa, Homo sapiens
NAGVTQTPKFRILKIGQSMTLQCTQDMNH

SEQ ID NO: 3516 - protein, 22 aa, Homo sapiens
NYMYWYRQDPGMGLKLIYYSVG

SEQ ID NO: 3517 - protein, 449 aa, synthetic construct; identical to SEQ ID NO: 591

SEQ ID NO: 3518 - protein, 214 aa, synthetic construct
DIQMTQSPSFLSASVGDRVTITCKASQNVADRVVWHQQKPGKAPKALIYSSSHRYKGVPSRFSGSGSGTEFTLTISSLQPEDFATYFCQQFKSYPLTFGQGTKLEIKRTVAAPSVFIFPPSDEQLKSGTASVVCLLNNFYPREAKVQWKVDNALQSGNSQESVTEQDSKDSTYSLSSTLTLSKADYEKHKVYACEVTHQGLSSPVTKSFNRGEC

SEQ ID NO: 3519 - protein, 448 aa, synthetic construct
ITCPPPMSVEHADIWVKSYSLYSRERYICNSGFKRKAGTSSLTECVLNKATNVAHWTTPSLKCIRDPALVHQRPAPPSGGSGGGGSGGGSGGGGSGGNWVNVISDLKKIEDLIQSMHIDATLYTESDVHPSCKVTAMKCFLLELQVISLESGDASIHDTVENLIILANNSLSSNGNVTESGCKECEELEEKNIKEFLQSFVHIVQMFINTSGGGGSGGGGSDKTHTCPPCPAPELLGGPSVFLFPPKPKDTLMISRTPEVTCVVVDVSHEDPEVKFNWYVDGVEVHNAKTKPREEQYASTYRVVSVLTVLHQDWLNGKEYKCKVSNKALPAPIEKTISKAKGQPREPQVYTLPPCREEMTKNQVSLWCLVKGFYPSDIAVEWESNGQPENNYKTTPPVLDSDGSFFLYSKLTVDKSRWQQGNVFSCSVMHEALHNHYTQKSLSLSPGK

SEQ ID NO: 3520 - protein, 351 aa, synthetic construct
NWVNVISDLKKIEDLIQSMHIDATLYTESDVHPSCKVTAMKCFLLELQVISLESGDASIHDTVENLIILANNSLSSNGNVTESGCKECEELEEKNIKEFLQSFVHIVQMFINTSGGGGSGGGGSDKTHTCPPCPAPELLGGPSVFLFPPKPKDTLMISRTPEVTCVVVDVSHEDPEVKFNWYVDGVEVHNAKTKPREEQYASTYRVVSVLTVLHQDWLNGKEYKCKVSNKALPAPIEKTISKAKGQPREPQVYTLPPCREEMTKNQVSLWCLVKGFYPSDIAVEWESNGQPENNYKTTPPVLDSDGSFFLYSKLTVDKSRWQQGNVFSCSVMHEALHNHYTQKSLSLSPGK

SEQ ID NO: 3521 - protein, 370 aa, synthetic construct; identical to SEQ ID NO: 593

SEQ ID NO: 3522 - protein, 22 aa, Homo sapiens
GYMSWYRQDPGMGLRLIYYSAA

SEQ ID NO: 3523 - protein, 77 aa, synthetic construct
ITCPPPMSVEHADIWVKSYSLYSRERYICNSGFKRKAGTSSLTECVLNKATNVAHWTTPSLKCIRDPALVHQRPAPP

SEQ ID NO: 3524 - protein, 20 aa, synthetic construct
SGGSGGGGSGGGSGGGGSGG

SEQ ID NO: 3525 - protein, 22 aa, Homo sapiens
GYLSWYRQDPGMGLRRIHYSVA

SEQ ID NO: 3526 - protein, 220 aa, synthetic construct
DIVMSQSPSSLAVSVGEKVTMSCKSSQSLLYSGNQKNYLAWYQQKPGQSPKLLIYWASTRESGVPDRFTGSGSGTDFTLTINSVKAEDLTVYYCQQYYGYPRTFGGGTKVEIKRADAAPTVSIFPPSSEQLTSGGASVVCFLNNFYPKDINVKWKIDGSERQNGVLNSWTDQDSKDSTYSMSSTLTLTKDEYERHNSYTCEATHKTSTSPIVKSFNRNEC

SEQ ID NO: 3527 - protein, 113 aa, synthetic construct
DIVMSQSPSSLAVSVGEKVTMSCKSSQSLLYSGNQKNYLAWYQQKPGQSPKLLIYWASTRESGVPDRFTGSGSGTDFTLTINSVKAEDLTVYYCQQYYGYPRTFGGGTKVEIK

SEQ ID NO: 3528 - protein, 107 aa, synthetic construct
RADAAPTVSIFPPSSEQLTSGGASVVCFLNNFYPKDINVKWKIDGSERQNGVLNSWTDQDSKDSTYSMSSTLTLTKDEYERHNSYTCEATHKTSTSPIVKSFNRNEC

SEQ ID NO: 3529 - protein, 452 aa, synthetic construct
QVQLQQSGTELMKPGASVKISCKASGYTFSNYWIEWIKQRPGHGLEWVGEILPGAGPTNYNEKFKGKATFTADSSSNTAYMQLSSLTSEDSAVYYCARTDYDYDWFAYWGQGTLVTVSAAKTTAPSVYPLAPVSGDTTGSSVTLGCLVKGYFPEPVTLTWNSGSLSSGVHTFPAVLQSDLYTLSSSVTVTSSTWPSQSITCNVAHPASSTKVDKKIEPKSCDKTHTCPPCPAPNAAGGPSVFIFPPKIKDVLMISLSPIVTCVVVDVSEDDPDVQISWFVNNVEVHTAQTQTHREDYNSTLRVVSALPIQHQDWMSGKEFKCKVNNKDLGAPIERTISKPKGSVRAPQVCVLPPPEEEMTKKQVTLSCAVTDFMPEDIYVEWTNNGKTELNYKNTEPVLDSDGSYFMVSKLRVEKKNWVERNSYSCSVVHEGLHNHHTTKSFSRTPGKEPEA

SEQ ID NO: 3530 - protein, 192 aa, synthetic construct
QVQLQQSGTELMKPGASVKISCKASGYTFSNYWIEWIKQRPGHGLEWVGEILPGAGPTNYNEKFKGKATFTADSSSNTAYMQLSSLTSEDSAVYYCARTDYDYDWFAYWGQGTLVTVSAAKTTAPSVYPLAPVSGDTTGSSVTLGCLVKGYFPEPVTLTWNSGSLSSGVHTFPAVLQSDLYTLSSSVTVTSS

SEQ ID NO: 3531 - protein, 256 aa, synthetic construct
TWPSQSITCNVAHPASSTKVDKKIEPKSCDKTHTCPPCPAPNAAGGPSVFIFPPKIKDVLMISLSPIVTCVVVDVSEDDPDVQISWFVNNVEVHTAQTQTHREDYNSTLRVVSALPIQHQDWMSGKEFKCKVNNKDLGAPIERTISKPKGSVRAPQVCVLPPPEEEMTKKQVTLSCAVTDFMPEDIYVEWTNNGKTELNYKNTEPVLDSDGSYFMVSKLRVEKKNWVERNSYSCSVVHEGLHNHHTTKSFSRTPGK

SEQ ID NO: 3532 - protein, 383 aa, synthetic construct
APTSSSTKKTQLQLEHLLLDLQMILNGINNYKNPKLTRMLTFKFYMPKKATELKHLQCLEEELKPLEEVLNLAQSKNFHLRPRDLISNINVIVLELKGSETTFMCEYADETATIVEFLNRWITFCQSIISTLTGGGGSGGGGSDKTHTCPPCPAPNAAGGPSVFIFPPKIKDVLMISLSPIVTCVVVDVSEDDPDVQISWFVNNVEVHTAQTQTHREDYNSTLRVVSALPIQHQDWMSGKEFKCKVNNKDLGAPIERTISKPKGSVRAPQVYVLPPCEEEMTKKQVTLWCMVTDFMPEDIYVEWTNNGKTELNYKNTEPVLDSDGSYFMYSKLRVEKKNWVERNSYSCSVVHEGLHNHHTTKSFSRTPGKGGGGSHHHHHHHH

SEQ ID NO: 3533 - protein, 227 aa, synthetic construct
DKTHTCPPCPAPNAAGGPSVFIFPPKIKDVLMISLSPIVTCVVVDVSEDDPDVQISWFVNNVEVHTAQTQTHREDYNSTLRVVSALPIQHQDWMSGKEFKCKVNNKDLGAPIERTISKPKGSVRAPQVYVLPPCEEEMTKKQVTLWCMVTDFMPEDIYVEWTNNGKTELNYKNTEPVLDSDGSYFMYSKLRVEKKNWVERNSYSCSVVHEGLHNHHTTKSFSRTPGK

SEQ ID NO: 3534 - protein, 13 aa, synthetic construct
GGGGSHHHHHHHH

SEQ ID NO: 3535 - protein, 368 aa, synthetic construct
DIVMSQSPSSLAVSVGEKVTMSCKSSQSLLYSGNQKNYLAWYQQKPGQSPKLLIYWASTRESGVPDRFTGSGSGTDFTLTINSVKAEDLTVYYCQQYYGYPRTFGGGTKVEIKRADAAPTVSIFPPSSEQLTSGGASVVCFLNNFYPKDINVKWKIDGSERQNGVLNSWTDQDSKDSTYSMSSTLTLTKDEYERHNSYTCEATHKTSTSPIVKSFNRNECGGGGSGGGGSGGGGSAPTSSSTKKTQLQLEHLLLDLQMILNGINNYKNPKLTRMLTFKFYMPKKATELKHLQCLEEELKPLEEVLNLAQSKNFHLRPRDLISNINVIVLELKGSETTFMCEYADETATIVEFLNRWITFCQSIISTLT

SEQ ID NO: 3536 - protein, 452 aa, synthetic construct
QVQLQQSGTELMKPGASVKISCKASGYTFSNYWIEWIKQRPGHGLEWVGEILPGAGPTNYNEKFKGKATFTADSSSNTAYMQLSSLTSEDSAVYYCARTDYDYDWFAYWGQGTLVTVSAAKTTAPSVYPLAPVSGDTTGSSVTLGCLVKGYFPEPVTLTWNSGSLSSGVHTFPAVLQSDLYTLSSSVTVTSSTWPSQSITCNVAHPASSTKVDKKIEPKSCDKTHTCPPCPAPNAAGGPSVFIFPPKIKDVLMISLSPIVTCVVVDVSEDDPDVQISWFVNNVEVHTAQTQTHREDYNSTLRVVSALPIQHQDWMSGKEFKCKVNNKDLGAPIERTISKPKGSVRAPQVYVLPPPEEEMTKKQVTLTCMVTDFMPEDIYVEWTNNGKTELNYKNTEPVLDSDGSYFMYSKLRVEKKNWVERNSYSCSVVHEGLHNHHTTKSFSRTPGKEPEA

SEQ ID NO: 3537 - protein, 260 aa, synthetic construct
TWPSQSITCNVAHPASSTKVDKKIEPKSCDKTHTCPPCPAPNAAGGPSVFIFPPKIKDVLMISLSPIVTCVVVDVSEDDPDVQISWFVNNVEVHTAQTQTHREDYNSTLRVVSALPIQHQDWMSGKEFKCKVNNKDLGAPIERTISKPKGSVRAPQVYVLPPPEEEMTKKQVTLTCMVTDFMPEDIYVEWTNNGKTELNYKNTEPVLDSDGSYFMYSKLRVEKKNWVERNSYSCSVVHEGLHNHHTTKSFSRTPGKEPEA

SEQ ID NO: 3538 - protein, 45 aa, Homo sapiens
DAQRDKSGRPSGRFSAERPERSVSTLKIQRTEQGDSAVYLCASSL

SEQ ID NO: 3539 - protein, 389 aa, synthetic construct
DCDIEGKDGKQYESVLMVSIDQLLDSMKEIGSNCLNNEFNFFKRHICDANKEGMFLFRAARKLRQFLKMNSTGDFDLHLLKVSEGTTILLNCTGQVKGRKPAALGEAQPTKSLEENKSLKEQKKLNDLCFLKRLLQEIKTCWNKILMGTKEHGGGGSGGGGSDKTHTCPPCPAPELLGGPSVFLFPPKPKDTLMISRTPEVTCVVVDVSHEDPEVKFNWYVDGVEVHNAKTKPREEQYASTYRVVSVLTVLHQDWLNGKEYKCKVSNKALPAPIEKTISKAKGQPREPQVYTLPPCREEMTKNQVSLWCLVKGFYPSDIAVEWESNGQPENNYKTTPPVLDSDGSFFLYSKLTVDKSRWQQGNVFSCSVMHEALHNHYTQKSLSLSPGK

SEQ ID NO: 3540 - protein, 152 aa, synthetic construct
DCDIEGKDGKQYESVLMVSIDQLLDSMKEIGSNCLNNEFNFFKRHICDANKEGMFLFRAARKLRQFLKMNSTGDFDLHLLKVSEGTTILLNCTGQVKGRKPAALGEAQPTKSLEENKSLKEQKKLNDLCFLKRLLQEIKTCWNKILMGTKEH

SEQ ID NO: 3541 - protein, 755 aa, synthetic construct
IWELKKDVYVVELDWYPDAPGEMVVLTCDTPEEDGITWTLDQSSEVLGSGKTLTIQVKEFGDAGQYTCHKGGEVLSHSLLLLHKKEDGIWSTDILKDQKEPKNKTFLRCEAKNYSGRFTCWWLTTISTDLTFSVKSSRGSSDPQGVTCGAATLSAERVRGDNKEYEYSVECQEDSACPAAEESLPIEVMVDAVHKLKYENYTSSFFIRDIIKPDPPKNLQLKPLKNSRQVEVSWEYPDTWSTPHSYFSLTFCVQVQGKSKREKKDRVFTDKTSATVICRKNASISVRAQDRYYSSSWSEWASVPCSGGGGSGGGGSGGGGSRNLPVATPDPGMFPCLHHSQNLLRAVSNMLQKARQTLEFYPCTSEEIDHEDITKDKTSTVEACLPLELTKNESCLNSRETSFITNGSCLASRKTSFMMALCLSSIYEDLKMYQVEFKTMNAKLLMDPKRQIFLDQNMLAVIDELMQALNFNSETVPQKSSLEEPDFYKTKIKLCILLHAFRIRAVTIDRVMSYLNASGGGGSGGGGSDKTHTCPPCPAPELLGGPSVFLFPPKPKDTLMISRTPEVTCVVVDVSHEDPEVKFNWYVDGVEVHNAKTKPREEQYASTYRVVSVLTVLHQDWLNGKEYKCKVSNKALPAPIEKTISKAKGQPREPQVYTLPPCREEMTKNQVSLWCLVKGFYPSDIAVEWESNGQPENNYKTTPPVLDSDGSFFLYSKLTVDKSRWQQGNVFSCSVMHEALHNHYTQKSLSLSPGK

SEQ ID NO: 3542 - protein, 518 aa, synthetic construct; identical to SEQ ID NO: 2290

SEQ ID NO: 3543 - protein, 305 aa, synthetic construct
IWELKKDVYVVELDWYPDAPGEMVVLTCDTPEEDGITWTLDQSSEVLGSGKTLTIQVKEFGDAGQYTCHKGGEVLSHSLLLLHKKEDGIWSTDILKDQKEPKNKTFLRCEAKNYSGRFTCWWLTTISTDLTFSVKSSRGSSDPQGVTCGAATLSAERVRGDNKEYEYSVECQEDSACPAAEESLPIEVMVDAVHKLKYENYTSSFFIRDIIKPDPPKNLQLKPLKNSRQVEVSWEYPDTWSTPHSYFSLTFCVQVQGKSKREKKDRVFTDKTSATVICRKNASISVRAQDRYYSSSWSEWASVPC

SEQ ID NO: 3544 - protein, 16 aa, synthetic construct
SGGGGSGGGGSGGGGS

SEQ ID NO: 3545 - protein, 197 aa, synthetic construct
RNLPVATPDPGMFPCLHHSQNLLRAVSNMLQKARQTLEFYPCTSEEIDHEDITKDKTSTVEACLPLELTKNESCLNSRETSFITNGSCLASRKTSFMMALCLSSIYEDLKMYQVEFKTMNAKLLMDPKRQIFLDQNMLAVIDELMQALNFNSETVPQKSSLEEPDFYKTKIKLCILLHAFRIRAVTIDRVMSYLNAS

SEQ ID NO: 3546 - protein, 370 aa, synthetic construct
QGQDRHMIRMRQLIDIVDQLKNYVNDLVPEFLPAPEDVETNCEWSAFSCFQKAQLKSANTGNNERIINVSIKKLKRKPPSTNAGRRQKHRLTCPSCDSYEKKPPKEFLERFKSLLQKMIHQHLSSRTHGSEDSGGGGSGGGGSDKTHTCPPCPAPELLGGPSVFLFPPKPKDTLMISRTPEVTCVVVDVSHEDPEVKFNWYVDGVEVHNAKTKPREEQYASTYRVVSVLTVLHQDWLNGKEYKCKVSNKALPAPIEKTISKAKGQPREPQVYTLPPCREEMTKNQVSLWCLVKGFYPSDIAVEWESNGQPENNYKTTPPVLDSDGSFFLYSKLTVDKSRWQQGNVFSCSVMHEALHNHYTQKSLSLSPGK

SEQ ID NO: 3547 - protein, 4 aa, synthetic construct
EPEA

SEQ ID NO: 3548 - protein, 448 aa, synthetic construct
QVQLQQSGTELMKPGASVKISCKASGYTFSNYWIEWIKQRPGHGLEWVGEILPGAGPTNYNEKFKGKATFTADSSSNTAYMQLSSLTSEDSAVYYCARTDYDYDWFAYWGQGTLVTVSAAKTTAPSVYPLAPVSGDTTGSSVTLGCLVKGYFPEPVTLTWNSGSLSSGVHTFPAVLQSDLYTLSSSVTVTSSTWPSQSITCNVAHPASSTKVDKKIEPKSCDKTHTCPPCPAPNAAGGPSVFIFPPKIKDVLMISLSPIVTCVVVDVSEDDPDVQISWFVNNVEVHTAQTQTHREDYNSTLRVVSALPIQHQDWMSGKEFKCKVNNKDLGAPIERTISKPKGSVRAPQVCVLPPPEEEMTKKQVTLSCAVTDFMPEDIYVEWTNNGKTELNYKNTEPVLDSDGSYFMVSKLRVEKKNWVERNSYSCSVVHEGLHNHHTTKSFSRTPGK

SEQ ID NO: 3549 - protein, 370 aa, synthetic construct
APTSSSTKKTQLQLEHLLLDLQMILNGINNYKNPKLTRMLTFKFYMPKKATELKHLQCLEEELKPLEEVLNLAQSKNFHLRPRDLISNINVIVLELKGSETTFMCEYADETATIVEFLNRWITFCQSIISTLTGGGGSGGGGSDKTHTCPPCPAPNAAGGPSVFIFPPKIKDVLMISLSPIVTCVVVDVSEDDPDVQISWFVNNVEVHTAQTQTHREDYNSTLRVVSALPIQHQDWMSGKEFKCKVNNKDLGAPIERTISKPKGSVRAPQVYVLPPCEEEMTKKQVTLWCMVTDFMPEDIYVEWTNNGKTELNYKNTEPVLDSDGSYFMYSKLRVEKKNWVERNSYSCSVVHEGLHNHHTTKSFSRTPGK

SEQ ID NO: 3550 - protein, 45 aa, Homo sapiens
EAQLEKSRLLSDRFSAERPKGSFSTLEIQRTEQGDSAMYLCASSL

SEQ ID NO: 3551 - protein, 29 aa, Homo sapiens
DSGVTQTPKHLITATGQRVTLRCSPRSGD

SEQ ID NO: 3552 - protein, 22 aa, Homo sapiens
LSVYWYQQSLDQGLQFLIQYYN

SEQ ID NO: 3553 - protein, 44 aa, Homo sapiens
GEERAKGNILERFSAQQFPDLHSELNLSSLELGDSALYFCASSV

SEQ ID NO: 3554 - protein, 29 aa, Homo sapiens
DAEITQSPRHKITETGRQVTLACHQTWNH

SEQ ID NO: 3555 - protein, 22 aa, Homo sapiens
NNMFWYRQDLGHGLRLIHYSYG

SEQ ID NO: 3556 - protein, 44 aa, Homo sapiens
VQDTNKGEVSDGYSVSRSNTEDLPLTLESAASSQTSVYFCASSE

SEQ ID NO: 3557 - protein, 29 aa, Homo sapiens
DAGITQSPRYKITETGRQVTLMCHQTWSH

SEQ ID NO: 3558 - protein, 22 aa, Homo sapiens
SYMFWYRQDLGHGLRLIYYSAA

SEQ ID NO: 3559 - protein, 44 aa, Homo sapiens
ADITDKGEVPDGYVVSRSKTENFPLTLESATRSQTSVYFCASSE

SEQ ID NO: 3560 - protein, 29 aa, Homo sapiens
DAGITQSPRHKVTETGTPVTLRCHQTENH

SEQ ID NO: 3561 - protein, 22 aa, Homo sapiens
RYMYWYRQDPGHGLRLIHYSYG

SEQ ID NO: 3562 - protein, 44 aa, Homo sapiens
VKDTDKGEVSDGYSVSRSKTEDFLLTLESATSSQTSVYFCAISE

SEQ ID NO: 3563 - protein, 29 aa, Homo sapiens
EAEVAQSPRYKITEKSQAVAFWCDPISGH

SEQ ID NO: 3564 - protein, 22 aa, Homo sapiens
ATLYWYRQILGQGPELLVQFQD

SEQ ID NO: 3565 - protein, 45 aa, Homo sapiens
ESVVDDSQLPKDRFSAERLKGVDSTLKIQPAELGDSAMYLCASSL

SEQ ID NO: 3566 - protein, 29 aa, Homo sapiens
EAGVAQSPRYKIIEKRQSVAFWCNPISGH

SEQ ID NO: 3567 - protein, 22 aa, Homo sapiens
ATLYWYQQILGQGPKLLIQFQN

SEQ ID NO: 3568 - protein, 45 aa, Homo sapiens
NGVVDDSQLPKDRFSAERLKGVDSTLKIQPAKLEDSAVYLCASSL

SEQ ID NO: 3569 - protein, 29 aa, Homo sapiens
EAGVVQSPRYKIIEKKQPVAFWCNPISGH

SEQ ID NO: 3570 - protein, 22 aa, Homo sapiens
NTLYWYLQNLGQGPELLIRYEN

SEQ ID NO: 3571 - protein, 45 aa, Homo sapiens
EEAVDDSQLPKDRFSAERLKGVDSTLKIQPAELGDSAVYLCASSL

SEQ ID NO: 3572 - protein, 29 aa, Homo sapiens
DAGVIQSPRHKVTEMGQSVTLRCEPISGH

SEQ ID NO: 3573 - protein, 22 aa, Homo sapiens
NDLLWYRQTFVQGLELLNYFCS

SEQ ID NO: 3574 - protein, 12 aa, Homo sapiens
WTLVDDSGVSKD

SEQ ID NO: 3575 - protein, 32 aa, Homo sapiens
FSAQMPDVSFSTLRIQPMEPRDLGLYFCASSF

SEQ ID NO: 3576 - protein, 29 aa, Homo sapiens
DAGIIQSPKHEVTEMGQTVTLRCEPIFGH

SEQ ID NO: 3577 - protein, 22 aa, Homo sapiens
NFLFWYRDTFVQGLELLSYFRS

SEQ ID NO: 3578 - protein, 44 aa, Homo sapiens
SIIDNAGMPTERFSAERPDGSFSTLKIQPAEQGDSAVYVCASRL

SEQ ID NO: 3579 - protein, 29 aa, Homo sapiens
DAGVIQSPRHEVTEMGQEVTLRCKPISGH

SEQ ID NO: 3580 - protein, 22 aa, Homo sapiens
NSLFWYRQTMMRGLELLIYFNN

SEQ ID NO: 3581 - protein, 45 aa, Homo sapiens
NVPIDDSGMPEDRFSAKMPNASFSTLKIQPSEPRDSAVYFCASSL

SEQ ID NO: 3582 - protein, 29 aa, Homo sapiens
DAGVIQSPRHEVTEMGQEVTLRCKPISGH

SEQ ID NO: 3583 - protein, 22 aa, Homo sapiens
DYLFWYRQTMMRGLELLIYFNN

SEQ ID NO: 3584 - protein, 45 aa, Homo sapiens; identical to SEQ ID NO: 3581

SEQ ID NO: 3585 - protein, 29 aa, Homo sapiens
DARVTQTPRHKVTEMGQEVTMRCQPILGH

SEQ ID NO: 3586 - protein, 22 aa, Homo sapiens
NTVFWYRQTMMQGLELLAYFRN

SEQ ID NO: 3587 - protein, 45 aa, Homo sapiens
RAPLDDSGMPKDRFSAEMPDATLATLKIQPSEPRDSAVYFCASGL

SEQ ID NO: 3588 - protein, 29 aa, Homo sapiens
AAGVIQSPRHLIKEKRETATLKCYPIPRH

SEQ ID NO: 3589 - protein, 22 aa, Homo sapiens
DTVYWYQQGPGQDPQFLISFYE

SEQ ID NO: 3590 - protein, 44 aa, Homo sapiens
KMQSDKGSIPDRFSAQQFSDYHSELNMSSLELGDSALYFCASSL

SEQ ID NO: 3591 - protein, 29 aa, Homo sapiens
EAGVTQFPSHSVIEKGQTVTLRCDPISGH

SEQ ID NO: 3592 - protein, 22 aa, Homo sapiens
DNLYWYRRVMGKEIKFLLHFVK

SEQ ID NO: 3593 - protein, 45 aa, Homo sapiens
ESKQDESGMPNNRFLAERTGGTYSTLKVQPAELEDSGVYFCASSQ

SEQ ID NO: 3594 - protein, 29 aa, Homo sapiens
DAMVIQNPRYQVTQFGKPVTLSCSQTLNH

SEQ ID NO: 3595 - protein, 22 aa, Homo sapiens
NVMYWYQQKSSQAPKLLFHYYD

SEQ ID NO: 3596 - protein, 44 aa, Homo sapiens
KDFNNEADTPDNFQSRRPNTSFCFLDIRSPGLGDTAMYLCATSR

SEQ ID NO: 3597 - protein, 29 aa, Homo sapiens
GEEVAQTPKHLVRGEGQKAKLYCAPIKGH

SEQ ID NO: 3598 - protein, 22 aa, Homo sapiens
SYVFWYQQVLKNEFKFLISFQN

SEQ ID NO: 3599 - protein, 45 aa, Homo sapiens
ENVFDETGMPKERFSAKCLPNSPCSLEIQATKLEDSAVYFCASSQ

SEQ ID NO: 3600 - protein, 29 aa, Homo sapiens
EPGVSQTPRHKVTNMGQEVILRCDPSSGH

SEQ ID NO: 3601 - protein, 22 aa, Homo sapiens
MFVHWYRQNLRQEMKLLISFQY

SEQ ID NO: 3602 - protein, 44 aa, Homo sapiens
QNIAVDSGMPKERFTAERPNGTSSTLKIHPAEPRDSAVYLYSSG

SEQ ID NO: 3603 - protein, 29 aa, Homo sapiens
NAGVMQNPRHLVRRRGQEARLRCSPMKGH

SEQ ID NO: 3604 - protein, 22 aa, Homo sapiens
SHVYWYRQLPEEGLKFMVYLQK

SEQ ID NO: 3605 - protein, 45 aa, Homo sapiens
ENIIDESGMPKERFSAEFPKEGPSILRIQQVVRGDSAAYFCASSP

SEQ ID NO: 3606 - protein, 29 aa, Homo sapiens
DGGITQSPKYLFRKEGQNVTLSCEQNLNH

SEQ ID NO: 3607 - protein, 22 aa, Homo sapiens
DAMYWYRQDPGQGLRLIYYSQI

SEQ ID NO: 3608 - protein, 44 aa, Homo sapiens
VNDFQKGDIAEGYSVSREKKESFPLTVTSAQKNPTAFYLCASSI

SEQ ID NO: 3609 - protein, 29 aa, Homo sapiens
GAVVSQHPSWVICKSGTSVKIECRSLDFQ

SEQ ID NO: 3610 - protein, 24 aa, Homo sapiens
ATTMFWYRQFPKQSLMLMATSNEG

SEQ ID NO: 3611 - protein, 44 aa, Homo sapiens
SKATYEQGVEKDKFLINHASLTLSTLTVTSAHPEDSSFYICSAR

SEQ ID NO: 3612 - protein, 29 aa, Homo sapiens
DTKVTQRPRLLVKASEQKAKMDCVPIKAH

SEQ ID NO: 3613 - protein, 22 aa, Homo sapiens
SYVYWYRKKLEEELKFLVYFQN

SEQ ID NO: 3614 - protein, 45 aa, Homo sapiens
EELIQKAEIINERFLAQCSKNSSCTLEIQSTESGDTALYFCASSK

SEQ ID NO: 3615 - protein, 29 aa, Homo sapiens
HAKVTQTPGHLVKGKGQKTKMDCTPEKGH

SEQ ID NO: 3616 - protein, 22 aa, Homo sapiens
TFVYWYQQNQNKEFMLLISFQN

SEQ ID NO: 3617 - protein, 45 aa, Homo sapiens
EQVLQETEMHKKRFSSQCPKNAPCSLAILSSEPGDTALYLCASSQ

SEQ ID NO: 3618 - protein, 29 aa, Homo sapiens
DADVTQTPRNRITKTGKRIMLECSQTKGH

SEQ ID NO: 3619 - protein, 22 aa, Homo sapiens
DRMYWYRQDPGLGLRLIYYSFD

SEQ ID NO: 3620 - protein, 45 aa, Homo sapiens
VKDINKGEISDGYSVSRQAQAKFSLSLESAIPNQTALYFCATSDL

SEQ ID NO: 3621 - protein, 29 aa, Homo sapiens
EADIYQTPRYLVIGTGKKITLECSQTMGH

SEQ ID NO: 3622 - protein, 22 aa, Homo sapiens
DKMYWYQQDPGMELHLIHYSYG

SEQ ID NO: 3623 - protein, 44 aa, Homo sapiens
VNSTEKGDLSSESTVSRIRTEHFPLTLESARPSHTSQYLCASSE

SEQ ID NO: 3624 - protein, 29 aa, Homo sapiens
DAVVTQFPRHRIIGTGKEFILQCSQNMNH

SEQ ID NO: 3625 - protein, 22 aa, Homo sapiens
VTMYWYRQDPGLGLKLVYYSPG

SEQ ID NO: 3626 - protein, 16 aa, Homo sapiens
TGSTEKGDISEGYHVS

SEQ ID NO: 3627 - protein, 27 aa, Homo sapiens
NTIASFPLTLKSASTNQTSVYLYASSS

SEQ ID NO: 3628 - protein, 29 aa, Homo sapiens
EAQVTQNPRYLITVTGKKLTVTCSQNMNH

SEQ ID NO: 3629 - protein, 22 aa, Homo sapiens
EYMSWYRQDPGLGLRQIYYSMN

SEQ ID NO: 3630 - protein, 44 aa, Homo sapiens
VEVTDKGDVPEGYKVSRKEKRNFPLILESPSPNQTSLYFCASSL

SEQ ID NO: 3631 - protein, 29 aa, Homo sapiens
DVKVTQSSRYLVKRTGEKVFLECVQDMDH

SEQ ID NO: 3632 - protein, 22 aa, Homo sapiens
ENMFWYRQDPGLGLRLIYFSYD

SEQ ID NO: 3633 - protein, 44 aa, Homo sapiens
VKMKEKGDIPEGYSVSREKKERFSLILESASTNQTSMYLCASSL

SEQ ID NO: 3634 - protein, 29 aa, Homo sapiens
SAVISQKPSRDICQRGTSLTIQCQVDSQV

SEQ ID NO: 3635 - protein, 23 aa, Homo sapiens
TMMFWYRQQPGQSLTLIATANQG

SEQ ID NO: 3636 - protein, 44 aa, Homo sapiens
SEATYESGFVIDKFPISRPNLTFSTLTVSNMSPEDSSIYLCSVE

SEQ ID NO: 3637 - protein, 29 aa, Homo sapiens
SQTIHQWPATLVQPVGSPLSLECTVEGTS

SEQ ID NO: 3638 - protein, 23 aa, Homo sapiens
NPNLYWYRQAAGRGLQLLFYSVG

SEQ ID NO: 3639 - protein, 42 aa, Homo sapiens
IGQISSEVPQNLSASRPQDRQFILSSKKLLLSDSGFYLCAWS

SEQ ID NO: 3640 - protein, 10 aa, synthetic construct
GFNIKSAYMH

SEQ ID NO: 3641 - protein, 11 aa, synthetic construct
SESVDSYGNSF

SEQ ID NO: 3642 - protein, 243 aa, synthetic construct
EVQLVESGGGLVQPGGSLRLSCAASGFTFSNFGMHWVRQAPGKGLEWVSYISSGSSTIYYADTLKGRFTISRDNSKNTLYLQMNSLRAEDTAVYYCARRGEGAMDYWGQGTTVTVSSGGGGSGGGGSGGGGSGGGGSDNQLTQSPSFLSASVGDRVTITCRASSSVNYIYWYQQKPGKAPKLLIYYTSNLAPGVPSRFSGSGSGNEYTLTISSLQPEDFATYYCQQFTSSPFTFGQGTKLEIK

SEQ ID NO: 3643 - protein, 16 aa, synthetic construct
GGGGSGGGGSGGGGGS

SEQ ID NO: 3644 - protein, 107 aa, synthetic construct [sequence omitted]

SEQ ID NO: 3645 - protein, 330 aa, synthetic construct
ASTKGPSVFPLAPSSKSTSGGTAALGCLVKDYFPEPVTVSWNSGALTSGVHTFPAVLQSSGLYSLSSVVTVPSSSLGTQTYICNVNHKPSNTKVDKKVEPKSCDKTHTCPPCPAPELLGGPSVFLFPPKPKDTLMISRTPEVTCVVVDVSHEDPEVKFNWYVDGVEVHNAKTKPREEQYASTYRVVSVLTVLHQDWLNGKEYKCKVSNKALPAPIEKTISKAKGQPREPQVYTLPPSREEMTKNQVSLTCLVKGFYPSDIAVEWESNGQPENNYKTTPPVLDSDGSFFLYSKLTVDKSRWQQGNVFSCSVMHEALHNHYTQKSLSLSPGK

SEQ ID NO: 3646 - protein, 334 aa, synthetic construct
ASTKGPSVFPLAPSSKSTSGGTAALGCLVKDYFPEPVTVSWNSGALTSGVHTFPAVLQSSGLYSLSSVVTVPSSSLGTQTYICNVNHKPSNTKVDKKVEPKSCDKTHTCPPCPAPELLGGPSVFLFPPKPKDTLMISRTPEVTCVVVDVSHEDPEVKFNWYVDGVEVHNAKTKPREEQYASTYRVVSVLTVLHQDWLNGKEYKCKVSNKALPAPIEKTISKAKGQPREPQVYTLPPSREEMTKNQVSLTCLVKGFYPSDIAVEWESNGQPENNYKTTPPVLDSDGSFFLYSKLTVDKSRWQQGNVFSCSVMHEALHNHYTQKSLSLSPGKEPEA

SEQ ID NO: 3647 - protein, 330 aa, synthetic construct; identical to SEQ ID NO: 41

SEQ ID NO: 3648 - protein, 227 aa, synthetic construct; identical to SEQ ID NO: 594

SEQ ID NO: 3649 - protein, 330 aa, synthetic construct; identical to SEQ ID NO: 592

SEQ ID NO: 3650 - protein, 10 aa, synthetic construct
GHDFRLTYIH

SEQ ID NO: 3651 - protein, 17 aa, synthetic construct
RVSAGSGNVKYNEKFKG

SEQ ID NO: 3652 - protein, 11 aa, synthetic construct
KASQNVGNRVV

SEQ ID NO: 3653 - protein, 7 aa, synthetic construct
SSSHRYK

SEQ ID NO: 3654 - protein, 17 aa, synthetic construct
RIYAGSGNVKYNEKFKG

SEQ ID NO: 3655 - protein, 11 aa, synthetic construct
KASQNVADRVV

SEQ ID NO: 3656 - protein, 10 aa, synthetic construct
GHDFKLTYIH

SEQ ID NO: 3657 - protein, 17 aa, synthetic construct
RVSAGSGNTKYNEKFKG

SEQ ID NO: 3658 - protein, 11 aa, synthetic construct
KASQNVGDRVA

SEQ ID NO: 3659 - protein, 17 aa, synthetic construct
RVYAGSGNTKYNEKFKG

SEQ ID NO: 3660 - protein, 11 aa, synthetic construct
KASQNVEDRVV

SEQ ID NO: 3661 - protein, 17 aa, synthetic construct
RISAGSGNTKYNEKFKG

SEQ ID NO: 3662 - protein, 11 aa, synthetic construct
KASQNVGDRVV

SEQ ID NO: 3663 - protein, 17 aa, synthetic construct
RIYAGSGNTKYNEKFKG

SEQ ID NO: 3664 - protein, 9 aa, synthetic construct
LQHNSYPLT

SEQ ID NO: 3665 - protein, 17 aa, synthetic construct
RVSAGSGNVNYAQKFQG

SEQ ID NO: 3666 - protein, 11 aa, synthetic construct
RASQNVDNRLG

SEQ ID NO: 3667 - protein, 11 aa, synthetic construct
KASQNVDNRVA

SEQ ID NO: 3668 - protein, 7 aa, synthetic construct
AASSLQK

SEQ ID NO: 3669 - protein, 44 aa, Homo sapiens
AGITDKGEVPNGYNVSRSTTEDFPLRLELAAPSQTSVYFCASSY

SEQ ID NO: 3670 - protein, 29 aa, Homo sapiens
NAGVTQTPKFHVLKTGQSMTLLCAQDMNH

SEQ ID NO: 3671 - protein, 22 aa, Homo sapiens
EYMYRYRQDPGKGLRLIYYSVA

SEQ ID NO: 3672 - protein, 44 aa, Homo sapiens
AALTDKGEVPNGYNVSRSNTEDFPLKLESAAPSQTSVYFCASSY

SEQ ID NO: 3673 - protein, 29 aa, Homo sapiens
NAGVTQTPKFHILKTGQSMTLQCAQDMNH

SEQ ID NO: 3674 - protein, 43 aa, Homo sapiens
AGTTDKEVPNGYNVSRLNTEDFPLRLVSAAPSQTSVYLCASSY

SEQ ID NO: 3675 - protein, 29 aa, Homo sapiens
NAGVTQTPKFHILKTGQSMTLQCAQDMNH

SEQ ID NO: 3676 - protein, 44 aa, Homo sapiens
AGITDKGEVPDGYNVSRSNTEDFPLRLESAAPSQTSVYFCASSY

SEQ ID NO: 3677 - protein, 29 aa, Homo sapiens
GAGVSQSLRHKVAKKGKDVALRYDPISGH

SEQ ID NO: 3678 - protein, 22 aa, Homo sapiens
NALYWYRQSLGQGLEFPIYFQG

SEQ ID NO: 3679 - protein, 45 aa, Homo sapiens
KDAADKSGLPRDRFSAQRSEGSISTLKFQRTQQGDLAVYLCASSS

SEQ ID NO: 3680 - protein, 29 aa, Homo sapiens
GAGVSQSPSNKVTEKGKDVELRCDPISGH

SEQ ID NO: 3681 - protein, 22 aa, Homo sapiens
TALYWYRQSLGQGLEFLIYFQG

SEQ ID NO: 3682 - protein, 45 aa, Homo sapiens
NSAPDKSGLPSDRFSAERTGGSVSTLTIQRTQQEDSAVYLCASSL

SEQ ID NO: 3683 - protein, 29 aa, Homo sapiens
GAGVSQTPSNKVTEKGKYVELRCDPISGH

SEQ ID NO: 3684 - protein, 22 aa, Homo sapiens
TALYWYRQSLGQGPEFLIYFQG

SEQ ID NO: 3685 - protein, 45 aa, Homo sapiens
TGAADDSGLPNDRFFAVRPEGSVSTLKIQRTERGDSAVYLCASSL

SEQ ID NO: 3686 - protein, 29 aa, Homo sapiens
GAGVSQSPRYKVAKRGRDVALRCDSISGH

SEQ ID NO: 3687 - protein, 22 aa, Homo sapiens
VTLYWYRQTLGQGSEVLTYSQS

SEQ ID NO: 3688 - protein, 29 aa, Homo sapiens
GAGVSQSPRYKVTKRGQDVALRCDPISGH

SEQ ID NO: 3689 - protein, 22 aa, Homo sapiens
VSLYWYRQALGQGPEFLTYFNY

SEQ ID NO: 3690 - protein, 45 aa, Homo sapiens
EAQQDKSGLPNDRFSAERPEGSISTLTIQRTEQRDSAMYRCASSL

SEQ ID NO: 3691 - protein, 29 aa, Homo sapiens
GAGVSQSPRYKVTKRGQDVTLRCDPISSH

SEQ ID NO: 3692 - protein, 22 aa, Homo sapiens
ATLYWYQQALGQGPEFLTYFNY

SEQ ID NO: 3693 - protein, 45 aa, Homo sapiens
EAQPDKSGLPSDRFSAERPEGSISTLTIQRTEQRDSAMYRCASSL

SEQ ID NO: 3694 - protein, 29 aa, Homo sapiens
GAGVSQSPRYKVAKRGQDVALRCDPISGH

SEQ ID NO: 3695 - protein, 22 aa, Homo sapiens
VSLFWYQQALGQGPEFLTYFQN

SEQ ID NO: 3696 - protein, 45 aa, Homo sapiens
EAQLDKSGLPSDRFFAERPEGSVSTLKIQRTQQEDSAVYLCASSL

SEQ ID NO: 3697 - protein, 29 aa, Homo sapiens
DTGVSQNPRHKITKRGQNVTFRCDPISEH

SEQ ID NO: 3698 - protein, 22 aa, Homo sapiens
NRLYWYRQTLGQGPEFLTYFQN

SEQ ID NO: 3699-3790 - skipped (92 entries)

SEQ ID NO: 3791 - protein, 447 aa, synthetic construct
QVQLVQSGAEVKKPGSSVKVSCKASGHDFRLTYIHWVRQAPGQGLEWMGRVSAGSGNVKYNEKFKGRVTITADTSTSTAYMELSSLRSEDTAVYYCAVSYYSYDVLDYWGQGTTVTVSSASTKGPSVFPLAPSSKSTSGGTAALGCLVKDYFPEPVTVSWNSGALTSGVHTFPAVLQSSGLYSLSSVVTVPSSSLGTQTYICNVNHKPSNTKVDKRVEPKSCDKTHTCPPCPAPELLGGPSVFLFPPKPKDTLMISRTPEVTCVVVDVSHEDPEVKFNWYVDGVEVHNAKTKPREEQYASTYRVVSVLTVLHQDWLNGKEYKCKVSNKALPAPIEKTISKAKGQPREPQVCTLPPSREEMTKNQVSLSCAVKGFYPSDIAVEWESNGQPENNYKTTPPVLDSDGSFFLVSKLTVDKSRWQQGNVFSCSVMHEALHNHYTQKSLSLSP

SEQ ID NO: 3792 - protein, 328 aa, synthetic construct
ASTKGPSVFPLAPSSKSTSGGTAALGCLVKDYFPEPVTVSWNSGALTSGVHTFPAVLQSSGLYSLSSVVTVPSSSLGTQTYICNVNHKPSNTKVDKRVEPKSCDKTHTCPPCPAPELLGGPSVFLFPPKPKDTLMISRTPEVTCVVVDVSHEDPEVKFNWYVDGVEVHNAKTKPREEQYASTYRVVSVLTVLHQDWLNGKEYKCKVSNKALPAPIEKTISKAKGQPREPQVCTLPPSREEMTKNQVSLSCAVKGFYPSDIAVEWESNGQPENNYKTTPPVLDSDGSFFLVSKLTVDKSRWQQGNVFSCSVMHEALHNHYTQKSLSLSP

SEQ ID NO: 3793 - protein, 368 aa, synthetic construct
APTSSSTKKTQLQLEHLLLDLQMILNGINNYKNPKLTRMLTFKFYMPKKATELKHLQCLEEELKPLEEVLNLAQSKNFHLRPRDLISNINVIVLELKGSETTFMCEYADETATIVEFLNRWITFAQSIISTLTGGGGSGGGGSDKTHTCPPCPAPELLGGPSVFLFPPKPKDTLMISRTPEVTCVVVDVSHEDPEVKFNWYVDGVEVHNAKTKPREEQYASTYRVVSVLTVLHQDWLNGKEYKCKVSNKALPAPIEKTISKAKGQPREPQVYTLPPCREEMTKNQVSLWCLVKGFYPSDIAVEWESNGQPENNYKTTPPVLDSDGSFFLYSKLTVDKSRWQQGNVFSCSVMHEALHNHYTQKSLSLSP

SEQ ID NO: 3794 - protein, 225 aa, synthetic construct
DKTHTCPPCPAPELLGGPSVFLFPPKPKDTLMISRTPEVTCVVVDVSHEDPEVKFNWYVDGVEVHNAKTKPREEQYASTYRVVSVLTVLHQDWLNGKEYKCKVSNKALPAPIEKTISKAKGQPREPQVYTLPPCREEMTKNQVSLWCLVKGFYPSDIAVEWESNGQPENNYKTTPPVLDSDGSFFLYSKLTVDKSRWQQGNVFSCSVMHEALHNHYTQKSLSLSP

SEQ ID NO: 3795 - protein, 449 aa, synthetic construct
QVQLVQSGAEVKKPGASVKVSCKASGFNIKSAYMHWVRQAPGQGLEWMGRIDPATGKTKYAPKFQARVTMTADTSTNTAYMELSSLRSEDTAVYYCARSLNWDYGLDYWGQGTLVTVSSASTKGPSVFPLAPSSKSTSGGTAALGCLVKDYFPEPVTVSWNSGALTSGVHTFPAVLQSSGLYSLSSVVTVPSSSLGTQTYICNVNHKPSNTKVDKRVEPKSCDKTHTCPPCPAPELLGGPSVFLFPPKPKDTLMISRTPEVTCVVVDVSHEDPEVKFNWYVDGVEVHNAKTKPREEQYASTYRVVSVLTVLHQDWLNGKEYKCKVSNKALPAPIEKTISKAKGQPREPQVCTLPPSREEMTKNQVSLSCAVKGFYPSDIAVEWESNGQPENNYKTTPPVLDSDGSFFLVSKLTVDKSRWQQGNVFSCSVMHEALHNHYTQKSLSLSPGK

SEQ ID NO: 3796 - protein, 218 aa, synthetic construct
EIVLTQSPGTLSLSPGERATLSCRASKSVSILGTHLIHWYQQKPGQAPRLLIYAASNLESGIPDRFSGSGSETDFTLTISRLEPEDFAVYFCQQSIEDPWTFGGGTKVEIKRTVAAPSVFIFPPSDEQLKSGTASVVCLLNNFYPREAKVQWKVDNALQSGNSQESVTEQDSKDSTYSLSSTLTLSKADYEKHKVYACEVTHQGLSSPVTKSFNRGEC

SEQ ID NO: 3797 - protein, 111 aa, synthetic construct
EIVLTQSPGTLSLSPGERATLSCRASKSVSILGTHLIHWYQQKPGQAPRLLIYAASNLESGIPDRFSGSGSETDFTLTISRLEPEDFAVYFCQQSIEDPWTFGGGTKVEIK

SEQ ID NO: 3798 - protein, 449 aa, synthetic construct
ITCPPPMSVEHADIWVKSYSLYSRERYICNSGFKRKAGTSSLTECVLNKATNVAHWTTPSLKCIRDPALVHQRPAPPSGGSGGGGSGGGSGGGGSGGGNWVNVISDLKKIEDLIQSMHIDATLYTESDVHPSCKVTAMKCFLLELQVISLESGDASIHDTVENLIILANNSLSSNGNVTESGCKECEELEEKNIKEFLQSFVHIVQMFINTSGGGGSGGGGSDKTHTCPPCPAPELLGGPSVFLFPPKPKDTLMISRTPEVTCVVVDVSHEDPEVKFNWYVDGVEVHNAKTKPREEQYASTYRVVSVLTVLHQDWLNGKEYKCKVSNKALPAPIEKTISKAKGQPREPQVYTLPPCREEMTKNQVSLWCLVKGFYPSDIAVEWESNGQPENNYKTTPPVLDSDGSFFLYSKLTVDKSRWQQGNVFSCSVMHEALHNHYTQKSLSLSPGK

SEQ ID NO: 3799 - protein, 212 aa, synthetic construct
ITCPPPMSVEHADIWVKSYSLYSRERYICNSGFKRKAGTSSLTECVLNKATNVAHWTTPSLKCIRDPALVHQRPAPPSGGSGGGGSGGGSGGGGSGGGNWVNVISDLKKIEDLIQSMHIDATLYTESDVHPSCKVTAMKCFLLELQVISLESGDASIHDTVENLIILANNSLSSNGNVTESGCKECEELEEKNIKEFLQSFVHIVQMFINTS

SEQ ID NO: 3800 - protein, 631 aa, synthetic construct
QVQLVQSGAEVKKPGSSVKVSCKASGHDFRLTYIHWVRQAPGQGLEWMGRVSAGSGNVKYNEKFKGRVTITADTSTSTAYMELSSLRSEDTAVYYCAVSYYSYDVLDYWGQGTTVTVSSGGGGSGGGGSGGGGSGGGGSDIQMTQSPSFLSASVGDRVTITCKASQNVADRVVWHQQKPGKAPKALIYSSSHRYKGVPSRFSGSGSGTEFTLTISSLQPEDFATYFCQQFKSYPLTFGQGTKLEIKGGGGSGGGGSGGGGSAPTSSSTKKTQLQLEHLLLDLQMILNGINNYKNPKLTRMLTFKFYMPKKATELKHLQCLEEELKPLEEVLNLAQSKNFHLRPRDLISNINVIVLELKGSETTFMCEYADETATIVEFLNRWITFAQSIISTLTGGGGSGGGGSDKTHTCPPCPAPELLGGPSVFLFPPKPKDTLMISRTPEVTCVVVDVSHEDPEVKFNWYVDGVEVHNAKTKPREEQYASTYRVVSVLTVLHQDWLNGKEYKCKVSNKALPAPIEKTISKAKGQPREPQVYTLPPCREEMTKNQVSLWCLVKGFYPSDIAVEWESNGQPENNYKTTPPVLDSDGSFFLYSKLTVDKSRWQQGNVFSCSVMHEALHNHYTQKSLSLSPGK

SEQ ID NO: 3801 - protein, 20 aa, synthetic construct
GGGGSGGGGSGGGGSGGGGS

SEQ ID NO: 3802 - protein, 329 aa, synthetic construct
AKTTAPSVYPLAPVSGDTTGSSVTLGCLVKGYFPEPVTLTWNSGSLSSGVHTFPAVLQSDLYTLSSSVTVTSSTWPSQSITCNVAHPASSTKVDKKIEPKSCDKTHTCPPCPAPNAAGGPSVFIFPPKIKDVLMISLSPIVTCVVVDVSEDDPDVQISWFVNNVEVHTAQTQTHREDYNSTLRVVSALPIQHQDWMSGKEFKCKVNNKDLGAPIERTISKPKGSVRAPQVYVLPPPEEEMTKKQVTLTCMVKDFMPEDIYVEWTNNGKTELNYKNTEPVLDSDGSYFMYSRLRVEKKNWVERNSYSCSVVHEGLHNHHTTKSFSRTPGK

What is claimed is:

1.-142. (canceled)

143. A multispecific molecule comprising:
(a) a tumor-associated antigen binding moiety;
(b) at least one cytokine molecule or a functional fragment or variant thereof; and
(c) a TCRβV-binding moiety, wherein the TCRβV-binding moiety is covalently linked to the at least one cytokine molecule or a functional fragment or variant thereof.

144. The multispecific molecule of claim 143, wherein the multispecific molecule comprises a first polypeptide chain comprising c, and a second polypeptide chain comprising an Fc domain;
wherein the first polypeptide chain and the second polypeptide chain are non-contiguous; and
wherein the tumor-associated antigen binding moiety is linked to the Fc domain of the first polypeptide chain, and the at least one cytokine molecule or a functional fragment or variant thereof is linked to the Fc domain of the second polypeptide chain.

145. The multispecific molecule of claim 144, wherein the Fc domain of the first polypeptide chain and the Fc domain of the second polypeptide chain are dimerized.

146. The multispecific molecule of claim 143, wherein the tumor-associated antigen binding moiety and the TCRβV-binding moiety comprises an antibody or antigen binding fragment thereof,
wherein the antigen binding fragment comprises any one selected from the group consisting of a Fab, a F(ab′)2, an Fv, a single chain Fv (scFv), a single domain antibody, a diabody (dAb), a camelid antibody, and any combination thereof.

147. The multispecific molecule of claim 143, wherein the tumor-associated antigen binding moiety comprises a Fab and the TCRβV-binding moiety comprises a scFv.

148. The multispecific molecule of claim 143, wherein the tumor-associated antigen binding moiety binds to a cancer antigen selected from the group consisting of CD19, CD123, CD22, CD30, CD171, CS-1, C-type lectin-like molecule-1, CD33, epidermal growth factor receptor variant III (EGFRvIII), ganglioside G2 (GD2), ganglioside GD3, TNF receptor family member B cell maturation (BCMA), Tn antigen ((Tn Ag) or (GalNAcα-Ser/Thr)), prostate-specific membrane antigen (PSMA), Receptor tyrosine kinase-like orphan receptor 1 (ROR1), Fms-Like Tyrosine Kinase 3 (FLT3), Tumor-associated glycoprotein 72 (TAG72), CD38, CD44v6, Carcinoembryonic antigen (CEA), Epithelial cell adhesion molecule (EPCAM), B7H3 (CD276), KIT (CD117), Interleukin-13 receptor subunit alpha-2, mesothelin, Interleukin 11 receptor alpha (IL-11Ra), prostate stem cell antigen (PSCA), Protease Serine 21, vascular endothelial growth factor receptor 2 (VEGFR2), Lewis (Y) antigen, CD24, Platelet-derived growth factor receptor beta (PDGFR-beta), Stage-specific embryonic antigen-4 (SSEA-4), CD20, Folate receptor alpha, Receptor tyrosine-protein kinase ERBB2 (Her2/neu), Mucin 1, cell surface associated (MUC1), epidermal growth factor receptor (EGFR), neural cell adhesion molecule (NCAM), Prostase, prostatic acid phosphatase (PAP), elongation factor 2 mutated (ELF2M), Ephrin B2, fibroblast activation protein alpha (FAP), insulin-like growth factor 1 receptor (IGF-I receptor), carbonic anhydrase IX (CAIX), Proteasome (Prosome, Macropain) Subunit, Beta Type, 9 (LMP2), glycoprotein 100 (gp100/pmel17), oncogene fusion protein consisting of breakpoint cluster region (BCR) and Abelson murine leukemia viral oncogene homolog 1 (Abl) (bcr-abl), tyrosinase, ephrin type-A receptor 2 (EphA2), Fucosyl GM1, sialyl Lewis adhesion molecule (sLe), ganglioside GM3, transglutaminase 5 (TGS5), high molecular weight-melanoma-associated antigen (HMWMAA), o-acetyl-GD2 ganglioside (OAcGD2), Folate receptor beta, tumor endothelial marker 1 (TEM1/CD248), tumor endothelial marker 7-related (TEM7R), claudin 6 (CLDN6), thyroid stimulating hormone receptor (TSHR), G protein-coupled receptor class C group 5, member D (GPRC5D), chromosome X open reading frame 61 (CXORF61), CD97, CD179a, anaplastic lymphoma kinase (ALK), Polysialic acid, placenta-specific 1 (PLAC1), hexasaccharide portion of globoH glycoceramide (GloboH), mammary gland differentiation antigen (NY-BR-1), uroplakin 2 (UPK2), Hepatitis A virus cellular receptor 1 (HAVCR1), adrenoceptor beta 3 (ADRB3), pannexin 3 (PANX3), G protein-coupled receptor 20 (GPR20), lymphocyte antigen 6 complex, locus K 9 (LY6K), Olfactory receptor 51E2 (OR51E2), TCR Gamma Alternate Reading Frame Protein (TARP), Wilms tumor protein (WT1), Cancer/testis antigen 1 (NY-ESO-1/LAGE-1), Cancer/testis antigen 2 (LAGE-1a), Melanoma-associated antigen 1 (MAGE-A1), ETS translocation-variant gene 6, located on chromosome 12p (ETV6-AML), sperm protein 17 (SPA17), X Antigen Family, Member 1A (XAGE1), angiopoietin-binding cell surface receptor 2 (Tie 2), melanoma cancer testis antigen-1 (MAD-CT-1), melanoma cancer testis antigen-2 (MAD-CT-2), Fos-related antigen 1, tumor protein p53 (p53), p53 mutant, prostein, Survivin, telomerase, prostate carcinoma tumor antigen-1, melanoma antigen recognized by T cells 1, Rat sarcoma (Ras) mutant, human Telomerase reverse transcriptase (hTERT), sarcoma translocation breakpoints, melanoma inhibitor of apoptosis (ML-IAP), ERG (transmembrane protease, serine 2 (TMPRSS2) ETS fusion gene), N-Acetyl glucosaminyl-transferase V (NA17), paired box protein Pax-3 (PAX3), Androgen receptor, Cyclin B1, v-myc avian myelocytomatosis viral oncogene neuroblastoma derived homolog (MYCN), Ras Homolog Family Member C (RhoC), Tyrosinase-related protein 2 (TRP-2), Cytochrome P450 1B1 (CYP1B1), CCCTC-Binding Factor (Zinc Finger Protein)-Like, Squamous Cell Carcinoma Antigen Recognized By T Cells 3 (SART3), Paired box protein Pax-5 (PAX5), proacrosin binding protein sp32 (OY-TES1), lymphocyte-specific protein tyrosine kinase (LCK), A kinase anchor protein 4 (AKAP-4), synovial sarcoma, X breakpoint 2 (SSX2), Receptor for Advanced Glycation Endproducts (RAGE-1), renal ubiquitous 1 (RUI), renal ubiquitous 2 (RU2), legumain, human papilloma virus E6 (HPV E6), human papilloma virus E7 (HPV E7), intestinal carboxyl esterase, heat shock protein 70-2 mutated (mut hsp70-2), CD79a, CD79b, CD72, Leukocyte-associated immunoglobulin-like receptor 1 (LAIR1), Fc fragment of IgA receptor (FCAR or CD89), Leukocyte immunoglobulin-like receptor subfamily A member 2 (LILRA2), CD300 molecule-like family member f (CD300LF), C-type lectin domain family 12 member A (CLEC12A), bone marrow stromal cell antigen 2 (BST2), EGF-like module-containing mucin-like hormone receptor-like 2 (EMR2), lymphocyte antigen 75 (LY75), Glypican-3 (GPC3), Fc receptor-like 5 (FCRL5), FcRH5, PDL1, CD47, prostate specific membrane antigen (PMSA), prostate-specific antigen (PSA), Ron Kinase, c-Met, Immature laminin receptor, TAG-72, BING-4, Calcium-activated chloride channel 2, Cyclin-B1, 9D7, Ep-CAM, EphA3, SAP-1, PRAME, SSX-2, Melan-A/MART-1, TRP1/gp75, MC1R, β-catenin, BRCA1/2, CDK4, CML66, Fibronectin, Ras, TGF-B receptor, AFP, ETA, MAGE, CA-125, BAGE, GAGE, CDC27, a actinin-4, gangliosides, MART-2, MUC2, MUM1, MUM2, MUM3, NA88-1, NPM, OA1, OGT, RCC, RU11, RU12, SAGE, TRG, TSTA, L1-CAM, gpA33, GM2, VEGFR, Integrins, carbohydrates, TRAILR1, TRAILR2, RANKL, TGF-beta, hyaluronic acid, collagen, tenascin C, tenascin W, and immunoglobulin lambda-like polypeptide 1 (IGLL1).

149. The multispecific molecule of claim 143, wherein the tumor-associated antigen binding moiety binds to MSLN, CD20, or HER2.

150. The multispecific molecule of claim 143, wherein the tumor-associated antigen binding moiety comprises:
(i) a VH comprising a HC CDR1 comprising the sequence of SEQ ID NO: 524, a HC CDR2 comprising the sequence of SEQ ID NO: 525, and a HC CDR3 comprising the sequence of SEQ ID NO: 526, and a VL comprising a LC CDR1 comprising the sequence of SEQ ID NO: 1168, a LC CDR2 comprising the sequence of SEQ ID NO: 1295, and a LC CDR3 comprising the sequence of SEQ ID NO: 528;
(ii) a VH comprising a HC CDR1 comprising the sequence of SEQ ID NO: 538, a HC CDR2 comprising the sequence of SEQ ID NO: 539, and a HC CDR3 comprising the sequence of SEQ ID NO: 540, and a VL comprising a LC CDR1 comprising the sequence of SEQ ID NO: 562, a LC CDR2 comprising the sequence of SEQ ID NO: 563, and a LC CDR3 comprising the sequence of SEQ ID NO: 564; or
(iii) a VH comprising a HC CDR1 comprising the sequence of SEQ ID NO: 581, a HC CDR2 comprising the sequence of SEQ ID NO: 582, and a HC CDR3 comprising the sequence of SEQ ID NO: 583, and a VL comprising a LC CDR1 comprising the sequence of SEQ ID NO: 586, a LC CDR2 comprising the sequence of SEQ ID NO: 587, and a LC CDR3 comprising the sequence of SEQ ID NO: 588.

151. The multispecific molecule of claim 143, wherein the tumor-associated antigen binding moiety comprises:
(i) a VH comprising a sequence having at least 70% sequence identity to the sequence of SEQ ID NO: 523 and a VL comprising a sequence having at least 70% sequence identity to the sequence of SEQ ID NO: 527,
wherein the VH comprises a HC CDR1 comprising the sequence of SEQ ID NO: 524, a HC CDR2 comprising the sequence of SEQ ID NO: 525, and a HC CDR3 comprising the sequence of SEQ ID NO: 526, and the VL comprises a LC CDR1 comprising the sequence of SEQ ID NO: 1168, a LC CDR2 comprising the sequence of SEQ ID NO: 1295, and a LC CDR3 comprising the sequence of SEQ ID NO: 528;
(ii) a VH comprising a sequence having at least 70% sequence identity to the sequence of SEQ ID NO: 537 and a VL comprising a sequence having at least 70% sequence identity to the sequence of SEQ ID NO: 561,
wherein the VH comprises a HC CDR1 comprising the sequence of SEQ ID NO: 538, a HC CDR2 comprising the sequence of SEQ ID NO: 539, and a HC CDR3 comprising the sequence of SEQ ID NO: 540, and the VL comprises a LC CDR1 comprising the sequence of SEQ ID NO: 562, a LC CDR2 comprising the sequence of SEQ ID NO: 563, and a LC CDR3 comprising the sequence of SEQ ID NO: 564; or
(iii) a VH comprising a sequence having at least 70% sequence identity to the sequence of SEQ ID NO: 580 and a VL comprising a sequence having at least 70% sequence identity to the sequence of SEQ ID NO: 585,
wherein the VH comprises a HC CDR1 comprising the sequence of SEQ ID NO: 581, a HC CDR2 comprising the sequence of SEQ ID NO: 582, and a HC CDR3 comprising the sequence of SEQ ID NO: 583, and the VL comprises a LC CDR1 comprising the sequence of SEQ ID NO: 586, a LC CDR2 comprising the sequence of SEQ ID NO: 587, and a LC CDR3 comprising the sequence of SEQ ID NO: 588.

152. The multispecific molecule of claim 143, wherein the tumor-associated antigen binding moiety comprises:
(i) a VH comprising the sequence of SEQ ID NO: 523 and a VL comprising the sequence of SEQ ID NO: 527;
(ii) a VH comprising the sequence of SEQ ID NO: 537 and a VL comprising the sequence of SEQ ID NO: 561; or
(iii) a VH comprising the sequence of SEQ ID NO: 580 and a VL comprising the sequence of SEQ ID NO: 585.

153. The multispecific molecule of claim 143, wherein the TCRβV-binding moiety binds to one or more of a TCRβV subfamily selected from the group consisting of TCRβ V2 subfamily, TCRβ V3 subfamily, TCRβ V4 subfamily, TCRβ V5 subfamily, TCRβ V6 subfamily, TCRB V9 subfamily, TCRβ V10 subfamily, TCRβ V11 subfamily, TCRβ V12 subfamily, TCRβ V13 subfamily, TCRβ V16 subfamily, TCRβ V19, TCRβ V20 subfamily, TCRβ V21 subfamily, TCRβ V23 subfamily, TCRβ V27 subfamily, and TCRβ V28 subfamily.

154. The multispecific molecule of claim 143, wherein the TCRβV-binding moiety binds to TCRβV5 subfamily, TCRβV6 subfamily, TCRβV10 subfamily, TCRβV12 subfamily, or TCRβV20 subfamily.

155. The multispecific molecule of claim 143, wherein the TCRβV-binding moiety comprises:
(i) a VH comprising a HC CDR 1 comprising the sequence of SEQ ID NO: 3650, a HC CDR2 comprising the sequence of SEQ ID NO: 3651, and a HC CDR3 comprising the sequence of SEQ ID NO: 5, and a VL comprising a LC CDR1 comprising the sequence of SEQ ID NO: 3655, a LC CDR2 comprising the sequence of SEQ ID NO: 3653, and a LC CDR3 comprising the sequence of SEQ ID NO: 8; or
(ii) a VH comprising a HC CDR1 comprising the sequence of SEQ ID NO: 542, a HC CDR2 comprising the sequence of SEQ ID NO: 543, and a HC CDR3 comprising the sequence of SEQ ID NO: 544, and a VL comprising a LC CDR1 comprising the sequence of SEQ ID NO: 545, a LC CDR2 comprising the sequence of SEQ ID NO: 546, and a LC CDR3 comprising the sequence of SEQ ID NO: 547.

156. The multispecific molecule of claim 143, wherein the TCRβV-binding moiety comprises:
(i) a VH comprising a sequence having at least 70% sequence identity to the sequence of SEQ ID NO: 1346 and a VL comprising a sequence having at least 70% sequence identity to the sequence of SEQ ID NO: 1349,
wherein the VH comprises a HC CDR1 comprising the sequence of SEQ ID NO: 3650, a HC CDR2 comprising the sequence of SEQ ID NO: 3651, and a HC CDR3 comprising the sequence of SEQ ID NO: 5, and the VL comprises a LC CDR1 comprising the sequence of SEQ ID NO: 3655, a LC CDR2 comprising the sequence of SEQ ID NO: 3653, and a LC CDR3 comprising the sequence of SEQ ID NO: 8; or
(ii) a VH comprising a sequence having at least 70% sequence identity to the sequence of SEQ ID NO: 541 and a VL comprising a sequence having at least 70% sequence identity the sequence of SEQ ID NO: 3527,
wherein the VH comprises a HC CDR1 comprising the sequence of SEQ ID NO: 542, a HC CDR2 comprising the sequence of SEQ ID NO: 543, and a HC CDR3 comprising the sequence of SEQ ID NO: 544, and the VL comprises a LC CDR1 comprising the sequence of SEQ ID NO: 545, a LC CDR2 comprising the sequence of SEQ ID NO: 546, and a LC CDR3 comprising the sequence of SEQ ID NO: 547.

157. The multispecific molecule of claim 143, wherein the TCRβV-binding moiety comprises:
(i) a VH comprising the sequence of SEQ ID NO: 1346 and a VL comprising the sequence of SEQ ID NO: 1349; or
(ii) a VH comprising the sequence of SEQ ID NO: 541 and a VL comprising the sequence of SEQ ID NO: 3527.

158. The multispecific molecule of claim 143, wherein the TCRβV-binding moiety comprises an scFv comprising:
(i) the sequence of SEQ ID NO: 1346 operatively linked to the sequence of SEQ ID NO: 1349; or
(ii) the sequence of SEQ ID NO: 541 operatively linked to the sequence of SEQ ID NO: 3527.

159. The multispecific molecule of claim 143, wherein the TCRβV-binding moiety comprises an scFv comprising:
(i) the sequence of SEQ ID NO: 1346 operatively linked to the sequence of SEQ ID NO: 1349 via a linker comprising the sequence of SEQ ID NO: 3801; or
(ii) the sequence of SEQ ID NO: 541 operatively linked to the sequence of SEQ ID NO: 3527 via a linker comprising the sequence of SEQ ID NO: 3801.

160. The multispecific molecule of claim 143, wherein the TCRβV-binding moiety comprises:
(i) an scFv comprising a sequence having at least 70% sequence identity to the sequence of SEQ ID NO: 1331,
wherein a VH of the scFv comprises a HC CDR1 comprising the sequence of SEQ ID NO: 3650, a HC CDR2 comprising the sequence of SEQ ID NO: 3651, and a HC CDR3 comprising the sequence of SEQ ID NO: 5, and a VL of the scFv comprises a LC CDR1 comprising the sequence of SEQ ID NO: 3655, a LC CDR2 comprising the sequence of SEQ ID NO: 3653, and a LC CDR3 comprising the sequence of SEQ ID NO: 8; or
(ii) an scFv comprising a sequence having at least 70% sequence identity to the sequence of SEQ ID NO: 1376,
wherein a VH of the scFv comprises a HC CDR1 comprising the sequence of SEQ ID NO: 542, a HC CDR2 comprising the sequence of SEQ ID NO: 543, and a HC CDR3 comprising the sequence of SEQ ID NO: 544, and a VL of the scFv comprises a LC CDR1 comprising the sequence of SEQ ID NO: 545, a LC CDR2 comprising the sequence of SEQ ID NO: 546, and a LC CDR3 comprising the sequence of SEQ ID NO: 547.

161. The multispecific molecule of claim 143, wherein the TCRβV-binding moiety comprises an scFv comprising the sequence of SEQ ID NO: 1331 or an scFv comprising the sequence of SEQ ID NO: 1376.

162. The multispecific molecule of claim 143, wherein the at least one cytokine molecule or a functional fragment or variant thereof comprises IL-2 or a functional fragment or variant thereof comprising a sequence having at least 90% sequence identity to the sequence of SEQ ID NO: 2270 or the sequence of SEQ ID NO: 2191.

163. The multispecific molecule of claim 144, wherein the at least one cytokine molecule or a functional fragment or variant thereof comprises IL-15 or a functional fragment or variant thereof comprising a sequence having at least 90% sequence identity to the sequence of SEQ ID NO: 2170 or the sequence of SEQ ID NO: 3799; (iv) IL-7 or a functional fragment or variant thereof comprising a sequence having at least 75% sequence identity to the sequence of SEQ ID NO: 3540; or (v) IL-21 or a functional fragment or variant thereof comprising a sequence having at least 75% sequence identity to the sequence of SEQ ID NO: 2193.

164. The multispecific molecule of claim 163, wherein the at least one cytokine molecule or a functional fragment or variant thereof further comprises the sequence of SEQ ID NO: 3523 linked to the sequence having at least 90% sequence identity to the sequence of SEQ ID NO: 2170 or to the sequence having at least 90% sequence identity to the he sequence of SEQ ID NO: 3799.

165. The multispecific molecule of claim 143, wherein the at least one cytokine molecule or a functional fragment or variant thereof comprises IL-12 or a functional fragment or variant thereof comprising a sequence having at least 75% sequence identity to the sequence of SEQ ID NO: 3542.

166. The multispecific molecule of claim 143, wherein the at least one cytokine molecule or a functional fragment or variant thereof comprises IL-7 or a functional fragment or variant thereof comprising a sequence having at least 90% sequence identity to the sequence of SEQ ID NO: 3540.

167. The multispecific molecule of claim 143, wherein the at least one cytokine molecule or a functional fragment or variant thereof comprises IL-21 or a functional fragment or variant thereof comprising a sequence having at least 90% sequence identity to the sequence of SEQ ID NO: 2193.

168. The multispecific molecule of claim 164, wherein the Fc domain of the first polypeptide chain and the Fc domain of the second polypeptide chain is selected from the group consisting of a human IgG1 Fc region or a fragment thereof, a human IgG2 Fc region or a fragment thereof, and a human IgG4 Fc region or a fragment thereof.

169. The multispecific molecule of claim 164, wherein the Fc domain of the first polypeptide chain and the Fc domain of the second polypeptide chain comprises:
(i) an Fc interface with one or more of: a paired cavity-protuberance, an electrostatic interaction, or a strand-exchange, wherein the dimerization of the first Fc region and the second Fc region is enhanced as indicated by a greater ratio of heteromultimer:homomultimer forms relative to a dimerization of Fc regions with a non-engineered interface; and/or
(ii) an Asn297Ala (N297A) mutation or a Leu234Ala/Leu235Ala (LALA) mutation.

170. The multispecific molecule of claim 164, wherein
(i) the Fc domain of the first polypeptide chain comprises a sequence having at least 90% sequence identity to the sequence of SEQ ID NO: 3649 or SEQ ID NO: 3792, and the Fc domain of the second polypeptide chain comprises a sequence having at least 90% sequence identity to the sequence of SEQ ID NO: 3648 or SEQ ID NO: 3794, or
(ii) the Fc domain of the first polypeptide chain comprises a sequence having at least 90% sequence identity to the sequence of SEQ ID NO: 3648 or SEQ ID NO: 3794, and the Fc domain of the second polypeptide chain comprises a sequence having at least 90% sequence identity to the sequence of SEQ ID NO: 3649 or SEQ ID NO: 3792.

171. The multispecific molecule of claim 164, wherein
(i) the Fc domain of the first polypeptide chain comprises a sequence having the sequence of SEQ ID NO: 3649 or SEQ ID NO: 3792, and the Fc domain of the second polypeptide chain comprises the sequence of SEQ ID NO: 3648 or SEQ ID NO: 3794, or
(ii) the Fc domain of the first polypeptide chain comprises the sequence of SEQ ID NO: 3648 or SEQ ID NO: 3794, and the Fc domain of the second polypeptide chain comprises the sequence of SEQ ID NO: 3649 or SEQ ID NO: 3792.

172. The multispecific molecule of claim 143, wherein the multispecific molecule consists of a first polypeptide chain, a second polypeptide chain, and a third polypeptide chain, wherein:
(A)(i) the first polypeptide chain comprises the sequence of SEQ ID NO: 523 operatively linked to the sequence of SEQ ID NO: 3649;
(ii) the second polypeptide chain comprises the sequence of SEQ ID NO: 1331 operatively linked to the sequence of SEQ ID NO: 2270 operatively linked to the sequence of SEQ ID NO: 3648; and
(iii) the third polypeptide chain comprises the sequence of SEQ ID NO: 527 operatively linked to the sequence of SEQ ID NO: 3644;
(B)(i) the first polypeptide chain comprises a first sequence comprising the sequence of SEQ ID NO: 523 operatively linked to a second sequence comprising the sequence of SEQ ID NO: 523 operatively linked to the sequence of SEQ ID NO: 3649;
(ii) the second polypeptide chain comprises the sequence of SEQ ID NO: 1331 operatively linked to the sequence of SEQ ID NO: 2270 operatively linked to the sequence of SEQ ID NO: 3648; and
(iii) the third polypeptide chain comprises the sequence of SEQ ID NO: 527 operatively linked to the sequence of SEQ ID NO: 3644;
(C)(i) the first polypeptide chain comprises the sequence of SEQ ID NO: 537 operatively linked to the sequence of SEQ ID NO: 559;
(ii) the second polypeptide chain comprises the sequence of SEQ ID NO: 1376 operatively linked to the sequence of SEQ ID NO: 2191 operatively linked to the sequence of SEQ ID NO: 3533; and
(iii) the third polypeptide chain comprises the sequence of SEQ ID NO: 561 operatively linked to the sequence of SEQ ID NO: 558;
(D)(i) the first polypeptide chain comprises a first sequence comprising the sequence of SEQ ID NO: 537 operatively linked to a second sequence comprising the sequence of SEQ ID NO: 537 operatively linked to the sequence of SEQ ID NO: 559;
(ii) the second polypeptide chain comprises the sequence of SEQ ID NO: 1376 operatively linked to the sequence of SEQ ID NO: 2191 operatively linked to the sequence of SEQ ID NO: 3533; and
(iii) the third polypeptide chain comprises the sequence of SEQ ID NO: 561 operatively linked to the sequence of SEQ ID NO: 558; or
(E)(i) the first polypeptide chain comprises the sequence of SEQ ID NO: 580 operatively linked to the sequence of SEQ ID NO: 584;
(ii) the second polypeptide chain comprises the sequence of SEQ ID NO: 1376 operatively linked to the sequence of SEQ ID NO: 2191 operatively linked to the sequence of SEQ ID NO: 3533; and
(iii) the third polypeptide chain comprises the sequence of SEQ ID NO: 585 operatively linked to the sequence of SEQ ID NO: 3528.

173. The multispecific molecule of claim 150, wherein the multispecific molecule consists of a first polypeptide chain, a second polypeptide chain, and a third polypeptide chain, wherein:
(A)(i) the first polypeptide chain comprises a sequence having at least 70% sequence identity to the sequence of SEQ ID NO: 501;
(ii) the second polypeptide chain comprises a sequence having at least 70% sequence identity to the sequence of SEQ ID NO: 3800; and
(iii) the third polypeptide chain comprises a sequence having at least 70% sequence identity to the sequence of SEQ ID NO: 502;
(B)(i) the first polypeptide chain comprises a sequence having at least 70% sequence identity to the sequence of SEQ ID NO: 590;
(ii) the second polypeptide chain comprises a sequence having at least 70% sequence identity to the sequence of SEQ ID NO: 3800; and
(iii) the third polypeptide chain comprises a sequence having at least 70% sequence identity to the sequence of SEQ ID NO: 502;
(C)(i) the first polypeptide chain comprises a sequence having at least 70% sequence identity to the sequence of SEQ ID NO: 509;
(ii) the second polypeptide chain comprises a sequence having at least 70% sequence identity to the sequence of SEQ ID NO: 511; and
(iii) the third polypeptide chain comprises a sequence having at least 70% sequence identity to the sequence of SEQ ID NO: 510;
(D)(i) the first polypeptide chain comprises a sequence having at least 70% sequence identity to the sequence of SEQ ID NO: 512;
(ii) the second polypeptide chain comprises a sequence having at least 70% sequence identity to the sequence of SEQ ID NO: 511; and
(iii) the third polypeptide chain comprises a sequence having at least 70% sequence identity to the sequence of SEQ ID NO: 510; or
(E)(i) the first polypeptide chain comprises a sequence having at least 70% sequence identity to the sequence of SEQ ID NO: 519;
(ii) the second polypeptide chain comprises a sequence having at least 70% sequence identity to the sequence of SEQ ID NO: 511; and
(iii) the third polypeptide chain comprises a sequence having at least 70% sequence identity to the sequence of SEQ ID NO: 520.

174. The multispecific molecule of claim 143, wherein the multispecific molecule consists of a first polypeptide chain, a second polypeptide chain, and a third polypeptide chain, wherein:
(A)(i) the first polypeptide chain comprises the sequence of SEQ ID NO: 501;
(ii) the second polypeptide chain comprises the sequence of SEQ ID NO: 3800; and
(iii) the third polypeptide chain comprises the sequence of SEQ ID NO: 502;
(B)(i) the first polypeptide chain comprises the sequence of SEQ ID NO: 590;
(ii) the second polypeptide chain comprises the sequence of SEQ ID NO: 3800; and
(iii) the third polypeptide chain comprises the sequence of SEQ ID NO: 502;
(C)(i) the first polypeptide chain comprises the sequence of SEQ ID NO: 509;
(ii) the second polypeptide chain comprises the sequence of SEQ ID NO: 511; and
(iii) the third polypeptide chain comprises the sequence of SEQ ID NO: 510;
(D)(i) the first polypeptide chain comprises the sequence of SEQ ID NO: 512;
(ii) the second polypeptide chain comprises the sequence of SEQ ID NO: 511; and
(iii) the third polypeptide chain comprises the sequence of SEQ ID NO: 510; or
(E)(i) the first polypeptide chain comprises the sequence of SEQ ID NO: 519;
(ii) the second polypeptide chain comprises the sequence of SEQ ID NO: 511; and
(iii) the third polypeptide chain comprises the sequence of SEQ ID NO: 520.

175. A pharmaceutical composition comprising the multispecific molecule of claim 143, and a pharmaceutically acceptable carrier, excipient, or diluent.

176. A method of treating a condition or disease in a subject in need thereof comprising administering to the subject a therapeutically effective amount of the multispecific molecule of claim 143, thereby treating the condition or disease in the subject, wherein the condition or disease is cancer.

177. The method of claim 176, wherein the cancer is a solid tumor, a hematological cancer, a metastatic cancer, a soft tissue tumor, or any combination thereof.

178. The method of claim 176, wherein:
(i) the cancer is a solid tumor selected from the group consisting of melanoma, pancreatic cancer, breast cancer, colorectal cancer, lung cancer, skin cancer, ovarian cancer, liver cancer, and any combination thereof; or
(ii) the cancer is a hematological cancer selected from the group consisting of Hodgkin's lymphoma, Non-Hodgkin's lymphoma, acute myeloid leukemia (AML), chronic myeloid leukemia, myelodysplastic syndrome, multiple myeloma, T-cell lymphoma, acute lymphocytic leukemia, and any combination thereof.

179. An antibody molecule or an antigen binding domain comprises:
(i) a VH comprising a HC CDR1 comprising the sequence of SEQ ID NO: 524, a HC CDR2 comprising the sequence of SEQ ID NO: 525, and a HC CDR3 comprising the sequence of SEQ ID NO: 526, and a VL comprising a LC CDR1 comprising the sequence of SEQ ID NO: 1168, a LC CDR2 comprising the sequence of SEQ ID NO: 1295, and a LC CDR3 comprising the sequence of SEQ ID NO: 528;
(ii) a VH comprising a HC CDR1 comprising the sequence of SEQ ID NO: 538, a HC CDR2 comprising the sequence of SEQ ID NO: 539, and a HC CDR3 comprising the sequence of SEQ ID NO: 540, and a VL comprising a LC CDR1 comprising the sequence of SEQ ID NO: 562, a LC CDR2 comprising the sequence of SEQ ID NO: 563, and a LC CDR3 comprising the sequence of SEQ ID NO: 564; or
(iii) a VH comprising a HC CDR1 comprising the sequence of SEQ ID NO: 581, a HC CDR2 comprising the sequence of SEQ ID NO: 582, and a HC CDR3 comprising the sequence of SEQ ID NO: 583, and a VL comprising a LC CDR1 comprising the sequence of SEQ ID NO: 586, a LC CDR2 comprising the sequence of SEQ ID NO: 587, and a LC CDR3 comprising the sequence of SEQ ID NO: 588.
